United States Patent Application Publication US 2019/0183130 A1 - sequence listing, part 7

SEQ ID NO: 1 - DNA, 19352526 bp, Cryptococcus macerans (residues 11,611,519-13,546,771 of 19,352,526)
taggagcgaaaggcatcccagacctcgctcgtcgggagcgcgatccattgacagcgggcggcgaacaggctgagcgcatctgccggccggccgacccgaatgagacgcatcatctcggccgtgatccacaaacgctggccggcgttgtctccgaggccatggctcccgtcgaaatgcgtcgtcagacgacggtgcaggagcgcgacgagccgaggccgtgggaggggcgtcatatagagtgcctcgaggatgttggagagggctactgccgtcttgcgggtcgttgaacgactgaggaggaatatcgcacggggcagatgctcggcgccgggccgcccattcgtgaggagcagcagcagccggtcgtcatctcccgcctgtgtcgggccgattgcaatctcgtctgggtagtcctcgtgcgcgaggactcgcagttgccgtagcagtggcgagctgcctccgtgtttgcgcttgatgtcgttaagcaggtagcggtagacattccggtcaatcgttggccggacgtagccgcgtttgaaaaagggttcgctcgtttctcgcgccttgaggaccgtcgagacggcgtcctccaagctgcgattcttcagcaggcggtagatggccgtgttgaagaagctacagcgctctgccgagtcactcgcccagccagcgctggcacacatcgactcaacgagcgtgtaggccgtgccgggcggcgagaaggcgacaatgtgccgcaggagacgctcgccgtagatctcaccgagacctttttcgcagaagagcatgagggcccgtgcaagtaagccaagatgggtcgggtaacagagcagctgctcgacgacttgatcgtgctgccggatgagagccattgggagctgcgtcgcccggcggtcgacctcaacgggcaagagcgacagccagaggatgaaccactcgagccggtcctcggccgtcccgatctctcggcttgagagcgactcgagcgcagcgcgcaggtagaccagatcaaacggaacggtcgtccctgccgagtggagcgtctggaaatcttctcgcgcatccgcccaacgtccggcacgaatggcttcgacgagcggcatggagctgtcttcggccgtcgaggtcgaggccgcactcagcgagcgtctggcgtcgtcgaccgagacgcgcagcgcggcgtactcgtcgggcgcctcgtcctcgaacagccccgcatcagcctcgtgcctcgcgttccagtcgttgaggagcttggcccggcctccaaggatcgggtcactcgagtacatgtcgccgaccttgaacgccggccgggccgcggagctcttgcctcgggtgaaacgctgagacgaggcaaaagacgagcttgggccggcgacgggcgaggcgagcgagcagctggtggaggcgagcaagggccaagtccggccgacagacagcgatggtaactggctcttggccgctgcagcgacagcttgccagcagagcggtccgacgggagcttgtgcgctcgccatgctggagcaggccgtcagaaggaaagcgtcagccctgctcgcttggcgcgtgctatggccgtgccttgacgcacaacggcgtgaatccagatggatccgcaagagcggccggtatgattgggcgtaagctggatgagtctgctacatgtcagcctgcgagtccttgaccaaggcgaaaagcagagtgaggtgctcactacgttgagcagacgacggagctgcgggcccggaactcgttgcctggagcgggaccctcgagcttcgcgacgaccagccgaggcgcttgactgtattccgagcgactgaaacctcgcgcccgagctgaccagctggaacgtaaggtgagagtgaggggcgaagggcagagacggcgtgctggttgaggttggcggggaggcctctcgtcccgactccctgcgcgctacacgaagccgagcggccgtccgagctggtccctcccgaccgcaaccccgtctgctcctcgaaccctcatggagtcgttcctttcgtccgcctcggacgctccggatcagcccgcggcccggtctggtcaacgtccagcggcgaagtcagtcccgctcaaacgcttcagcgtcgccgtagcaccggctgccgcaggcggtccccttcatccgccgctcagccatgctgcgaccgtcgacgcctacgaggccggcgtcaggcagcgcaagcctccgccccagcttggcgttcagcgcgagggctccgacaacagtgcgtcccttgcagcgggaatcttctgcggagaggatgctgaatcccctttgaacctgcgcacagccgcccgcgcctcctcgagcgctacgacccgtctcggccaggtgatccctcgctctgcacgccgccaggtgtcggcttcgctcctgtcatcgtctgggcgcgagtcttggcggtaccagacaatttccacgagcgagcgccgtccgccgccctcagcggcaggcgagtctgacctcggcttgtcggcctgggcctccctggccgaactgcgcgccggcccgctctcgcctcgactcgcctacccgccgtcaacgctgccgccggccaccgagcgtccgggccgcgagagctactttcggcaggctttcgagtcgagcgcggcatcggacgctggcgactcgtctttcgggccgttcctctcgtcgacactgcgcgggaagcggccctacggccgcgattcggtcgcctcgtcctctgtctcgagcctagccggcgccgaccgtgtcacgccctccaggatcgacatcggcggccgcaatccggcgctgtccagggaggacgccgacctgcgcgaagtcgtggcctcgccaggctcgatcatcgactacggcggtcactttgtcagctcgacgccgaacgaaggcagcggcaacatctcgcacagccagttgatcaacttcagccgcgagtcgatctctcagtcgctcatcgagagctcggacgaggagggcagcgcgggaagccaagcggcgtacttgacccagagccctgctgcgaccgagcggccgctcgccgacgtcgaggagccgcgccgctcgctcctgacggacgcagcgacatcgggtgaccgcctgaaggacaagtctcgcgcgtcgccgcgcgtctcgtccgatcccccgctttcgaactttgctcaagccctgccggcccaaggatcgccgacgaaagcacccctcgctcgctggcggcgcccgctcctcggcttcagccgacagcagatcgacgttctcaagtgctcgctggcgtacctgcttgcctcgctttttacgttcgtgcccgcactcaactccttcctcctggggacgtcgtcggcgcatacgatcgcgaccgtctccgtctattacaatccagccaagtcgctcggcacgatgctcgaggccgacgtctactgcctcgtcgtcgcgacgatagcggcccttgtcagtctcgccgccgtcggcacgctcaaggcagccgacagcgtcggtacgagctggggccgcgactgtggcgactggacggcgctcctcttctggtttggcggctcgctcagcgtcctcgcctggctcaaggtccggctcggcaagcagagcttcaactcggcgacctcaatggggctcgtcatcatgagcaacgtcatcatcaagggtaggtcgcttgtccttccgagtgcgggctcgccgacgctgatcgcccgtcctccactcgttacagagggcggcctacgcaagctgctcgaggtcctgctcaacgtcgtcatcggcaccagcattagcaacctcgtctgcttctccctctttccggtgcgtcggcctgtgacaccctctcgcgggtagatctggcccctgacgagctcggccctcgaccgctgcagcattcggcgacctctaagttgcaaaccgacatcaactcgaccctcatctcattttcgaccctcctgacaatcctatcgcagaccttcctgcttgacgcaccctctccatcctcgtcgccggcgcaggaccttgcgtcggctgtcgccgcgcacgagagatcgttcaacggcctcaaaaagaccctctcggaagccaagtccgagtttctcggcgaagcgggcgagcgtttcgaggtcgtcgtcagtagtttgacgcggctcgctcagcatttgacaggccttcggagcggaactggcctccagtatgagctgatggcggcagccaaggagggccgcatcgtcatcgacgagcccaagcctgacgaccccagcaaggttgcctggagcccgggcgagcgcaaggaggtctcgggcttctttgacgctgcggctacagccgaagcgaaggcgttcggagactccgaggacgagcgcctggcggccgaggccaacgtcttcagcgaagtccgggaacacgtcggccctcagctccgcaacgtcactgccgcctgcaatgcgaccctgctcgctatccggtcgacattcaacgagacgccaaagggtgcgggcgagctggccgacgactttacggacctcacccaggagctccagagcgcactcgtcgacttccaggtcgccagctccgactcgatcgctgacatctacggtagcggagccgatgccggagatcacgctgggcacgtgcagtcgccaaaggagaccgtctttctcgtcttctagtgcgtcgccttggctgggggtcgtcatctcctctgaacgctgaccgcgacgccgccctccagtttcatcttcacgttcgacgagtttgctcgcgaggtcctttttctgctcgagcagatggaggcgaccctgtttgaccggccacgcgagacgacctggcagcggatgtggcgccagctacgaagggcgccgcgcctgcgtacggcaggcggccctcggccgcgtcggactctgcggaagcgcatgtgtacgtcctctctgcgatcagagcgagtcgtgcctgtgattgacgctgcccctctcgccagcgaccatcatcccgatcgacccttcagagtttttgaagccggccgtctttccgccgaagagtgagctcgcggccaacacggcgaccaaccctctcggctcaatgctctcgttcaagccgcggctctaccacttgatctgggaattcctcgagcggtgccgcaagaatgacattcgctacgccgtcaaggttgggatggcgaccggcttgctcgctgctcccgccttctccgagacctggcggacgacctttctcgagttccgcatggagtggggcttgatcgctttttttgcgaccatgagcccgaccgagtacgtctctttctctccggctctttggtcggcagccgcgctgactacgatctcggccgctcgtgcacagaggagcgaccaacgcggcaagcgtcttccgtcttctcggcaccttgtgcgtctacaaagctgctcgcgacagacgcctgccctccaagctgattgactgctcaaaccattcagcgccggtgctgtcgttgctgctgtcgtctactcggctttcccggaggacaacgttgccctgccgctcatcggctttctcttctccttgccctgcttttgggttatcgtcacgatgtgagcattatcgcccggcgcggatcgttgagctcaaagctgatggcggcaccatttccaggcctttctacgctgccgccggccggtttggtacgctgagggagttttcactgtcgccagctcacgccgtcgctgacaagcggctccctctcgtcagtgctcctgacgtacaacctgacggcgctctattggtgcgctcctctgcgtgcacggttagcattcgagccgtcgctgacctcggaagcctattgccagctacaactcacgcgcggtcgacacatccgtcctggagatcgcctaccgacgcttcgtgtcagtctcgatcggcgtcgtctacacactgattgtttcccgcgtcatctggccctacgccgctcgtcgggagctgctctctggcctgtccgagtacgtcctcattccgtggccctcaacgcccgtcccaccaggctgaccggccggcgcccatctacagtttctacgtcgatctctcgttcctctatacgcgcctgctggcgaccttcagctcatccgagcgcgtcccgccgatggtgccgaccaatgactcgaacgccccctcctgggacgaggagcaggccgccttgaccggaggtcaccgctcaccggccaccgccgacccgctcagcgcgtcggtccgagaattcatggcgatggagcttcacctccagctgagcatcctgcagctcaaggaactccttgaggcagccacgcgcgagccgcggctcaaaggtccgttgaaccggcttctgctcgtcagatcgagtcgccactgattgagccggctcttgcatttgacaggcccgttccccaaggcgctcttcaacagctgcatcatgtcgagccagacgattctcgaccgcttccactctatccgatgcgtcgtcaaccgggacgagtgggatcaagtgcgccggctgtgaggctcgactgtcgtcgccttcttgtgctgacacatgcctcgctgcccggccagtcgctgtatcgctcgcacgtcgcgcccgtcaacgcagagcggcgcgagatggtccgtccgttcgcgctcaggctcgtcggacccggttgacatttcgacctttgctcgaccaggtcggcaacgtcctcctctacttttcgaccatctcggccggcttccgactaaagacaccgatgccgccgtacctgccaccggccgagcgcgcacggcagcgcctgcttcgcaaggccgaggcgctctcgctcgtccacgtcccgggtaagggtccgaagcacctgctcttcttctcctacgtcctggccatggccggcatcatccacgagctcgaatacgtcggggcgatccttcagagcgcgtacggcgtcatcgggggcggcgtcgacgagtttgaggacctcttcttcaatccgctcatgagtgagctcagcgacagcgacgacggcgaggacacgctcggctagacacggatgcacttctagacatttgacgacccttgacgattttacgctgtctttatgatgtgccggccctgctttgcgaggcgtgtggagagaggacgaaacgcgtcgttcgcgcagcacccgtcggcgtcgagctggacgaacagctccctctggcaggcctctctcaacatcgacgtcgtctctcgcccctcgctgattatgatcgatctcctatgaagtcgcaagctggttcagtgtgtctggcgagactctgctcgcactcttgatcgcgaccgccaagccgacgacggccaagccgccgaccgccgagctcgacgggcgtgactcgaagtcgaggcaagagtcaaggtgctgtcgccgcttgctccccttcgactagcaactcgaagccgtccaagagaatcccttaagcatggcccgtcttctcaaggtgcgctgcctgtcgctcgtcgtcggcctgtgttgaaggctgacaagcgttgctcccgggtgggcctcaggtcgctgctgctcaagtcggccggagtgcgcctgttgaccgctttgccggctgctgtaactcgctctgacgcccgcttggcttccggatctcagtcgatcgaaagacctcccgtcaggccgtcctgatccggctgatcgctctattggagcaagctgccgccgagggcgtccagctcgccgtcttcccggagacggttagccctccatctcgccctcttgacctgacgggctgctgacctgcgtcgctccgtcagaccttttgcggcttcttcccacgctacatcatccgcgacgaggccgagctcgactcgtactttgagcttgagacggccgaggacggcatcaccagctcgaccaatgtcaagccgttcttcgaccgcgcgcgcgagctcgggatcgacgtcaccatcggctacggcgaacggacaccggagggcgagcggtacaacagcgcgagctacgtttcgggccagaacggcaaggtccttggcaaaacgtgagcggtcgatcgagtgtcgctgccatcgccaacgctctcgcgctgacacgcgctcaccgttcaccaggcgcaaggtccacttggccggcaccgtcgagccgttcgacgacgagcctgagacaacaaaccagctcgagaagcgctactttacgccaggcaatctcggcttcgaagccttccgcgcaacctcgctcaagaaggcggcaggcggcgcatgctcgcccgtcgttgggcagctcatctgcatggaccgtcgctggccggaagcatggaggtgcttaggtctgagcggggtcgagatcgtctgcagcggctttgtgcgtccctctggtgtgtccttccggccatctgacttcgtcgttgatcgcttgcgtcgcctcgtcctttgcccgattctaggtgacgaccgcgtacgcccccaggctatgggcaggcgaccaaaacatctctcggaaggacgcatgcgagcttgtgacgtcgcagcacaaacgtacgtgctgcccggtcgcagagggcgccttgtaccgcgaaggctagcctgaatcatcatcgtgtgcactctgatcagtcgtcgtccaggcaaacgcctacaccaactcgacgttttgcatcgccgccgcccgggccggaatcgatgacggcgtgcacccccttatatctggcagcatcattgttgacccgcagggccggatcgtcgcagagaatgcgaccgagaaggagtaagtcgtgctttcggcatcgggcaagatctcgcccgagctgacccggcatctccctttcgcgcccgccacctcttagcgagcttgtcgtcgccgagattgacctcgacgcctgccggcagggcaaggagcggacgttcaactttgacaagcaccggcggcccgaggcctatggccggctgctcgctcagaagggtgtcattgagcccaaggagccggccgagcagtgagttcacccatgagctgtgcctggcttcgagcagggcgagagattcatggcacgagttgcaggagacagagtgaaacgatggcccgtgcagcagggcgtgagaggcatggcacgagtggcaggagatagagtgggacgatggcccgtggggcagctggcacgatttcgaccccgccctgcgccggtgaatacccaaactggccggcggccggaagggacgtctggtgcgcagcacgttgtgactcctcctggtctcccttcgcacccgatacaaggcctgaagtagaggttgaagatgtgactcgatgaaggggtcagagcagggagccgtcgaagctgtcgaagcggatgcgagaggaagaaagggcggagccgtcagagcaagtcaggcaggcaggaccgggccttcggagccgctctgtcagccccgccttgctgctgatcaaccgagccttgtcgggctcgacctttaagccgaccccctcactttctctttctccaccactgctctcccgtctcgacccgaggataaccctttcctgaggaaaaatccgttctctttcagtgacgacgaagaccgccttctcgcaaggaccacctccactctcagctctcgcccgccgccgcgcctgtccgacgttttgatggccgaccacttaggtcgccagtcgccgccctcgctcgcgccgacgctcgccggttcggtgacggacgatctcgtccagccggcctataccgaaaagtcgaccgagacgccgccgcccgagcaggcgccgggcatcgacgtcaagcgcgccgagggcgagtttgaagagctccggcgcgagctctcgcgcgcgtcgtcgctctatcggacccagaccggccagaaggatgtcgaaaagggcgaggacgaggacgactttgacctgctcgcctacatgaagggcagcaagtcggcccgcgaccaggagggctttaagaacaaggaggtgcgtcgcgagctcggggctgccttggcgaggtcgatcagaagtctgaccctcggcctgctccttaggtcggcgtcgcctgggacgacctgactgtcgtcggaggcggcggcctcaagatccacatccggaccttccccgacgccatcattgagcagatcatggcgcccgcgctcatgatcctcggcctctttgggtgcgtcgcgagcgtgtgcctggcttagggtcccgcgctaatctccgttccccccctccactcgcttccacctcggtcaccttagctaccacccgttcgctcccaagcccaagacgatcctcgaggtgcgtgtcaggagactgcaccccaagcttgagcagccagaaactgacgtttcgaccacttgtgcgcctcagggcttcgacggcctgctcctgcccggcgaaatgtgcctcgttctcggccggccaggctcgggctgctcgtccttcctgatgagcatcaccaacaaccgcgagaccttcctcaagacgaccggcgacgtccgctacgccggcatcgaggccgaggtgcgtcggcgcgaaggactgtgggctgggttcgaagactgaccgattcgccgatactccaggtcatgcgcaaaaagtacccgggcgaggtcgtctacaaccaggagggttagtcaatcgtgcacacacccttgtccggctgacttcgtacttgtgctgatgtctgccatctcctcttctcagatgacgtccacctgccgactctcaccgtcggccagacgctcgactttgccctctcgaccaagacgcccggcaagcgcctgcctggaatttcaccctccgagttccgcaagcaggtgctcgagacgacgcttaaaatgctcaacatctctcacaccaagaacaccgtcgttgggaaccaggtgcgcccctcgcgcgatgtgcctgtcattttggagtcgagacgaagagctgactgataccttcccatcacagttcgtccgcggcgtctccggcggcgagcggaaacgtgtctcgatcgccgagatgatggcttctcgtgcggccgtcggcgcctgggacaacaggcacgtctcgctgtcttgctttgttcggtcgaaaccgtttggctgaccgtcctcggagactcatagtacccgcggtcttgacgcctcgaccgcgctcgactacgccaagtcgatccggattctcaccgacgtcttccgcaacacgtccttcgtctccctgtaccaggccggcgagggcatctacaaccaattcgacaaggtcctcgtcatcgatgaaggtcggcaggtctactttggcccggccaaggaggcccgcgagtacatggtcggcctcggcttcaaagaccgccctcggcagacgacggccgactaccttacgggatgcacggacccaaatgagcggcgagtatctcgtgcacttttgtcccgcttgaagggcaatgctgacctattcgagcactttacagtcagtttcaggacggtcggtccgaggtcaacgtgcccagcaacgccgtccagctcgccgaggcctaccgcaagtcggagacctaccagcggatgaaggccgagcgcgacgagtacaacgagcgcatggccgccgacgcgacgaagcgcgacgatttcatggccgccgtcgccgaggacaagcgcaagggcgtgtccaagaagagcccgtacaccgtctcattcccgatgcaggtcgccgctctcaccaagcgccagttccagctcaagcggcaggacaagttcggcctctacaccggctactttacatcgattggtacgccgcacgactttgcgacagcctccctcgccctgccccttctctgattgacccatccatcgccccttcagtcattgcgatcatcagcggctcggtctacctgaacttgccagagacgtcggccggcgccttcacccgaggcggcgctatcttcatcgccatgctcttcaacgccctcaatgccttctccgagctgccgacgcagatgatgggccgcccgatcctcttcaagcaggttaactactcgtactaccggcccggcgctctcgcgatcgcctccaacttcgccgagctgcccttcgtacgtcgtagcgaccatgtatgggttggctctttggctgtgcgttctgaccttttgcctcctcctcccgctcacagaacctgccccagatcctcatcttctggtgcgtcgtgtcgcctgtgtctcatggcggtctcttgggccttttgcctgacactcgcttccccttagcatcatcatctacttcatggccgctttggaacggtcggctggagctttcttcatctgtgcgtctgtcgttttgaattttgtcgcttcacaccgtcttgacacgcccccttttctcagtctacctcttcgtcatgttcacgtaggttgtctctttctgcgctcccgatctcgttgctgagctgatccattttggctttgcccgctcagcttcatggtcatgaccgcattcgtgcgtcttctgcccgctttagctctctctgtctccgtcattgattgaccgccttttgttttcatcgcagttccggtgcgtcgttacgattgcgcagcgcaacgtgcagtcggccgtctgctaaacgccttcttcctcctaggctgatcggcacgatgacgcggtcgtacgacgtcgccgcccgtctcgcgtcgatcctcatttcgctaatggtcatctacgccgggtcagtatcgagcggttgtctcgaccgcctttcgccgtcaacctgcctactgacgtcctgcttcgacctacgacgacatccagctatatgattgtgggtgccctcgcctatgttttgacgtggtctgcttgctgatttccttcggctcgcaccaatctccatcagcccgtctactcgatgaagcgctggctcttctggatctactacctggtgagacctgagtctctcggacgtgagctcattcgagggaggccgcgtcctggctgcgcggggctgccgcgtgctgcctgtcagagcctggcgcggcctccccttggctcaatcccttactgacggctctggaacgcctcctacagaaccccctcaattatgggtgcgtttccgtccttcctgcggagctgccgcgtacgctgacctcttctttcgaccgctgcccaccttcagcttcgcttcgcttatggagaacgagttcagccggatcgacctcacctgcgtcggcgcctcaattatccctggcaacgccggcgtcctcgacatctacccgaacgagctcggaccaaaccaggtctgcaatctcttcggcgcggtgcccggcctggccgaggtgtcgggcagcgactacatgtacgctggctacgagtaccgcaaggccgacatctggcgcaactttgggtgcgttcaaacctcctgcggctcattcttgtgagccccgtgctgaccgtccgctcaaccggtacccctctcgccagcatcctttggtgcttcttcctcggctttgctttcctccaggtcatggcaatggagttcctcgcgcacggccaacaacccctcgccatcactgtcttcgccaaggagaacgccgagaccaagaagcgcaacgaggccctccaggcgaccaaggaggcttcgcgacggggtgagattgagcaggacctttcgtcgcttacctccagccgcaagccgttcacgtgggaggacctcaaggttcgtccagttccttctcggcctcacgtctgatgtctcccgcctaacttccacaacccctctcagtacactgtgcctgtgcccggaggccaccgtcagctcctcaactcggtctatggatactgcaagcccggcactctgaccgcgctcatgggcgcgtccggtgccggtaagacgactttgcttgacgtcctcgccaaccgtaagacgattggcgtgatcgaaggcgacgtcctgatgaatgggcggccgatcggcatcgactttcagcgcggtaccgcctacgttgagcagcaggagtgcgccctggagtcactcgtcacctttccgcttagcctgactgacccacctgtcgttctccaactcagtgtccatgagtggacgacgactgtccgcgaagcgttacgctactctgcctacctccgccagccgttccacatcagcaaggaggagaaggacaattacgtcgaggagatcctgcagctgctgtgcgccgtttccttcggttcccttccaaactcacgctgacgttcctctctctttgcagcgagctcgaggaccttgccgacgctctcatcggcttccctggcttcggactgtctgttgaggcgcgcaagcgtctcacgatcggagtcgagctcgcggccaagccccagctgttgctcttcctggacgagccgacgtcagggctggacggccaatcggctttcaacgtcgtccgcttcctgcgcaagctcgccgccgccggccagagcatcctctgcaccattcaccagcccaacgctctactcttctcgcagttcgaccgcctcctgctcctccagcgcggcggacaggtgcgtcccgccctcccatgctcttggttgggcttggctgactcgcttttcgttgctgcagtgcgtctacttcggcgacgtcggcgaggacgcgtccgtcctcaacgcctacctcgaaaaaaacggtgcgccggtcccggcggacgcgaacacggccgagttcatgttggaggccatcggtgccggctcgtccaagcggatgggcggcggcgactggcatgagaagtggaaggcgagcgaggagttcgctacggtcaagcgcgagatcatcgagctcaaggagcaagccctcgctcagcccgacgacaccgatgccgagtcggccaaggagtacgccacgccctttgctttccagctcaagacgattgtgtacgtccgcagaacctcccgtcaggtcgcccttagactgacccgttcttcctcttccccctacagtaagcgcacgatgctggccttcttccggatggccgacgtgagtttggctcctgagcccgcttgccgagcatttggctgacctctcccgtctgcgacacctctagtacggctacacccgcctgttctcgcacggcgctatcgcgatcgttacctctcttactttcctcaacctcggttcctcgacccaggacatgcagtaccgaacttgtccgtttggcctccaatcgacccccttttctctgctcaaaacgctgctgctggctgacacctgcctgcacctttccagtcgccatcttcatcgtcaccgtcctgcctgccatcatcatcgctaacgtcgagccgacgtacatcatgtcgcgcgagacgtacaaccgcgaggcaagctccaaggtgcgttctcgcgtgatctgctgcacggctctgcatcgccgcctggctatcacctggcattgttgaccaggttcttctcgtaccacagatgtacagcagcgtcgttttctcgattgcccagagtacgtccgcgctttcctgagtacgccttcgcggtctcgtttgtgccactgaccacccacaccacgtctcggcttcctttgcagtctgcgccgagatgcccctgagcgtcgtctgtgctgtcgcgttcttcctgctcttctacttcccgtgagtccccccaacggggttgcccccgctcgatcttttgctgacccccgcctcgcgccagcatgggcttcaactttgccccgagtcgtgccggctaccaattcttcatgatcctcatcgcgggtgcgtgattcctgcactcctcctccattgtaactctcgctgacctgccgtcctcgctcgctcgcctcagagatctactcggtcaccctcggccagctcgtcgccgccctttcgccaacgatcctcgttgcagccctgttcaaccccttcctgctcgtcatcttctcgctgtgtacgtccgattcctctcgtatatgcgctcgcccgcttaatcgttaactttccaaccccctttttctcgacagtctgcggcgtcacgatccccgctcctcagctcccccacttctggcgcagctggatgtaccaactcgaccccttcacgcgtctgattgccggcatgctctcgacggagttgcacgacctccggatcgagtgcctcgaccgcgagtacaagcttttctcgccgccggctggccagacatgtcagcagtgggctgcgccgtacatcggcgtcgtcggcggctacctcgccaacggagacgcgacggccgactgccagtactgcccctaccgcacgggcgacggttcgtccttctctctttcttatctattaacgaccaacgactgacctgaaaccggacctcccacagagttctacaccccgctcggcatctccttcgacaaccgctggcgtgatcgtacgtgccctgttgcacgtcactactgagttacctgcctaaccgattacttgtacctcttccacagtcggcatcctcatcgccttcacagcgtttaatattctggttaccgtccttgcatcgcgcttcttgcgctacgccaagcgctgagctcgaatcgccttcgatcgttgcgtcgcctctcaacactccttccctttccctctttccggaccctccggactcaaccttgaatcctggaccgaccctcgctttgcgccgttccctctcctttgttatgtgaacctttctttgctatacaaaaccttgcaggtcgaacaatatgaccgacactgccgaacccgcctcagatctcgtcgcccctgcacatgccaatgttaacgtcgtggtgccacgaggcggcggcggcgatcgagcggtagtggaggtatgcggcagcgaggaccgcaaagtgaaagatctgatggctcgagccaaagatgtcaaagatgcgcgggtgcttgcgctcggggtagcggagggcgtagttgatggcgccggcaatgtagctgcaaggaggacgggtcagccgagcacgatcgtcgcacgagaggatagaaaggtggtcgcacagtcctccgctgccgagcaggtagttgaggcccatctccttggagctgcgctcgaggccgtaggcaaggagggcatggctgacgggcacgacagctgacatgccgagcgagatgaagaccatcgtccgcgcccagcggtaggcgccggtcgtaaacttgtccgagaggacagtgtaaactgcgaggcagccgaggacggtgataacagctgcgtacgagccgttagcgtgttgtgcgcgagtggatggtgagggctcgcgcctggacgtacaggtgtagatgacctggaggtgcaggtcgcaccagaagccgtaaaacaggctaggatagttggagccgacgatcagaatgacgatgccgacctaatcagagcggacgtgcagcagtcagctgcctggcacgagttccgccaaggggacgcaaagcgcacatagtcgagccgattccagagcttgctgacggagcgcgagtgacaggagagggtatggtagcagccgctcatgccaaggcagatggccgccgagcagaggaatatctgggggacgggaaggaacaggaggctgtcagccactcgcagtgtgcaacgactaccgggcgaagcgacggcggcgcgcaccgtaaagtgcatcttgtcggtccagcggatcgtcggccggtaaattgccggcaggaagaggtgcgagtagatgtgcggcagtaggtagagcgcgccgaggccgtgcgtgagaatgttgaccgtctcgttgtggatgtagctgcgccggggccggacgaggagtgcgccgcagcagcagggatcagcctcaggcgggtcgagccgtcagatcaacggcaggacccaccctatggcactgtagaagcagccgaggaccgagttttgctgccgccggtagccgacgagcgtgtactcgctctcaaagtccctttttggagcaggagcgggcggtcagaaggccagatgagggaggcagcgatgacgcgacagaagccgagccggtgacgtacttcatccagggtgagagctcctcccagtcgagcagaggaaagtgccgtcgttcgtcgagcgggccgccgaggtccatagactctttagcgagcgacgtcttctcgctgtcgtcgccgtctgagccgcccggggagggggctgagcttgacgccgtgctggccgcagcgctggggagggcggtcgagcggggcgagctggccgagggagcgctggacgaggccgttgagtaattccggtctgaagtcatttcgtctatgcgtctaggaagaggtcttgaagaagctccgggcctggcagagtaaggtgatgggcgtcggagggcagcgtcgctgaggagggctcggcggagcttgtcggagactctgcgggactctcggccggcggagcaagactcgtcccctgtgttttgaagacccggagcatcacgagctcctgtaagattgtgctgagcagacatcgtctatgtcggatgctgcccaggtacgtctcgcgatggcttcaaatgaggcgcctctcggctgagaatccgaggtcggggcgcgcagcgctgcgcctgctcccggccggtcgctttgggtcgctcttgctaaggtcacctcgtcccttcccacagcagctagaagggaaggccggctagacgtccgggtctagtctcctgatatcactcatcttgtggaccgagagtgcttggaccgaaccctctgaaaaactcgcctcgactcgctcgacgacgcgcccgaaagtggaggttccgagggcgcgcccgtgccagcgcatccgaacgaccttcgccctctctctcggtccctcacctctcttacctcgtttgctgttcacgatggcgccagtaccccctccatcaccccgctcggccgagttcgcctactcgacctcgttgcgcaagggcctgccgcacgcggccgccgacctctctcactcggcccaggccgcgctcgaccgagccgaggagagcctcgtcgagctcgccgtccaggtcggcctcaagcacgagtcgcctgtcgctaccaatggcaacggcaacggccaccatgtgaacggcaatggcgacgcaaagctggtttctgtcgcggttgatgcggccgagacgccgagcgaggccttctcgaagctctcagtccaggtgcgtgctttcgtcagcccgcaggcgcgctgctgcagcgcgacgagggagagtccccgagctgacgcttcctcgctccttctaggacacgctcgcgaggcatgcgccgacctctgcgacgactggccttccagcctcggtcgtcgacgccctgctcgagcgctacggccacaacgagttcgaggtcgaggccgacgagcacgtcctgctcaaattcgccaagcaaatctacgagaatccgttgatcctgctcctgttaggcagtgccggcgtcagcctgctcgtcggcaacaccgaggacgccgtcagcattgcgattgccgtcatcattgtcctgaccggtgcgttgtccttcacgagcgcgctctgcggcgtatttccgtcgcgcctgcaccgcgcagcagctgactgagcgccgtctcttgcctgtcgtcagtcggctttgtccaggagcagcggtccgagaagtcgctcgaagcgctcacaaagctcgtcccgcactactgccatctcatccggtccgtctcgcgctcgctcgctgcctctttgctgggcttggccaaggcgtcacaggctgactttcggacctggccgcctcttcgtcctcgaccgcagtgacggccacacgcacaccctgcttgccaacacgctcgttcctggcgacctcatcacctttaccgtcggcgaccggattcccgccgacgtccggctcatcagcgcgatcgggctcgagatcgacgagagctcgctgacgggcgagaccgagccggtcaagaagtcgaccgccgcggccgcaccccacgccgacggcaaggtcggcctgagcgagcgcaacaatattggctacatgggcacgctcgtccggagcggacatggctcgggcatcgtcgtcgcaactgggtcaaagaccgagttcggcgtcatcttcagtatgatgcaggacgttgaggagaagcggacgcccttgcaaattgccatggacgagcttgcgacgcagctctccttcctttcgttcggcattatcggcgtcatcgtcctcatcggcgtctggcaaaagcggtcgtggctcgacatgtttacgatcggaggtgcgtctaactcggccgcgccaacgcgtgctgtcgctcccgagctgacctcgtcggcgctcctgctcttctatacagtctcgcttgccgttgccgccattcctgagggcctgccgatcgtcacaacggtcacactcgcgctcggcgtcctccgcatgagcgaccgcaaagcgatcgtcaagaagctcccgagcgtcgaggctctcggtagcgtcaacgtgatctgctcggacaagacgggcacgctcaccaagaacgagatgacggtcaccacgatctacacggtcgatgaggtcgtcgagttcgccgacggccacccgccgctcgctgcttcgtcttcgtctgccctgcgcatgacgctcgaaatcggcaatctttgcaataacgcgttcgaggacgacgagggcgtcgtcgtcggccaggcgacagacgtcgccatccttaatgtcgtctccgctttcggcgagaaggatcaccgcaaggtgcgctcggacgcctctcttcgtcatcgacagggccaagctgacctcctcgcttgcccatctacaggactttgagcgcctgaccgagatcccgttcagctccgagaccaaatatatggtcgtctctggcacctcatccggctcggccgagaccatctatctcaagggcgcgatcgatgccgtcctcgaccgctgcgcgtcttaccaccaggacgactcttcgactccagcgctcacggccgagctcaaggccatggtcgctcacaaggcgtccgagatcgcttcgaaaggcttgcgcgtcgtcgcgatggcttacggctcgggctcggcaatcgaggtcggccagcagctcgtctttgccggctttcaggcaatgatggacccgccccggcgcggcgttgccgaggccattggctcgctccagacggccggcatccacgtcgtgatgatcacgggcgacgccgaggagacggcaacctcgatcgcccgtgaccttggcttgcgcataacggccggcaaggagagctgtctgacgggcaaggccatcgaccagatgacccctcagcagctgcgggaagccgtcggccacattgccgtctttgcgcgggtcacgccgaagcacaagatgagcatcatctctgccttccaggccaacggcgacgtcgttgcgatgaccggcgacggaggtcggtccctgtatttctgtcggctgcctctgagagctgaagctgacccggacgcctgcccccctcgcagtcaacgacgcaccggcgctcaagatggccgacattggcatctcgatgggcaaaggcgggacggacgtcgccaaggaggcggccgacgtcatcctcgtcgacgacaactttgcgacgatcctgccggccgtcgaggagggcaagtcgatcttctacaacatccagaactttctcgtcttccagctttcgacggccgtcgccgccctgtcgatcatcaccatctcgaccctctttggtttgacgaacccgctcaacgcgatgcagatcctctttatcaacatcctcatggacggtgcgtcggcgtggcctaactcgatcgacgagcgtcgtgctgaccgttttcgtccgctgccctcaggcccgcccgcacaggcgctcggcgtcgacccggtcgaccctgccatcatgcgccgccggcctcgggccaagaacgcgccgatcctcactgcccgcctctttgcccgcgtcctcttttcagcgtcgatcatcatctccggcaccctctggatgtacatcgcccagacggccgaggacaacgacctctcgcgccgcgaccagacgatggtcagtctgcgctctgagcggacctccacctagccacccgtcgctgactgtgtgcaaccaacccccttgctctttgctcctcgccagacgttcacgactttcgtcttcctggacctcgcttcggccattcagaaccgcggcctcaactgcccgctgttcgccaaccggatgctcttcctcacgtgttctatctcgttcctcgcccaggtctcgctcatctacctgccgttcatgcagggcgtcttccagaccgagccgctcagcgtcgccgacttcctgacggtcctcggctggggcgcgctaagcatgtcgcttcacgaggcccggcggatctacgagcgccacacgatgcgccaagaggagaaggaggagcgccggctcatggacgaaggcctgctcgagtagacgaacggccgcgcctcccctcaggagctattgcctcctcgatccgacacttgtagacggacccgcaccctctgcggtaccattagatgcccttgctcgtaaaggcaggtcaccggcaactgacagagcaaggctgaagtcggcggaatcttttcatcggcgccgcagacatcaaagtgaagacagcagggtcccgatgactaagtgcgctcaaggcaaaagggtgcaagaacggatgacatgagatcaacaacagacacctctctatcgcaaaggacggtcagcaaggcagacgtctggtcgaccgcaaagggcgggtcagctcggcggcacccgctcgacgtccccttggtcagccagacgcgccgcacgccgacggcgtcgtccgtttcatcactcggtcaacaaaaagggggaaagtacggacgggcaataggtgggggagggagggagtgcaaggaggcatcgcgcccctccaaccctaagccgaccgtctacccgccccccctcgggggggcgggtagacggtcggcttagggttggaggggcgcgatgcctccttgcactgtacaaaaccgcggggaggggttgggggggcgctgatgattcatcgtgctctgatctctactccgccaccgccatttttctccttcgcccttcgtcctcttagtgcgcggacccgtcagctgacttgtctctttccccgtccagtgcaactcgtaacaggaccccttcttttggatctctcgttccttctgtgcttgcctttcgctcaacatgtctgcttatgtctgcttgcacctcctcctgtactgtcgattgccatggcgcctgttgcctacacgacttccctctgccgaactctcggaaagcgtgcccactcgctggcaggcgaatcgcgtcgacaggagtcgggggcctctccccatgccatcccgtcgtcagtcacccccagtcatggccagcaaggttcaaatcggtcatccagagagggtcacaagagagatggcaagggcgacaacagaaagggggaccggtcgaccgctcgctcgaagacaattcggcgtcggacgaggggagggttgagggagtacaaaaagggctgaacaaaggccggaagggagaaaaggggggattgaacaatcggagacatcgggagcatgggaagaaaggctacaaggaaaggaggagcgaagaccggaggatgaagggacgagccgagaaggggacggaccacgattgctgcggctggagaggatgaaagaaagagatgaagcggggggggggagagagggcatgagggatcaggcaatcgcctcgaccttccgccggcgctcgccaatgtcggcctcgtcctcgggctcgacatcgccgaggacaaactgcggccgctcctgctcgacctcacgctcgtcgtcgtcgtccgcctcgtccggatagaggatgctcgcggcccggccggggagggtcgggacagggcttggggcccgggcagggacgtcgaggatctctccgtcgtcgccggcggcggacgtgctggcgagggcgccatgcgtgagggtatgggcgtggtgatcgccgctgtgcgagtggtgcgagtgggacgagacggcggtgatagtccgctggaggccgagcttggaggacgggagggcaatccggaggagcgacgtgtaggctgcgaaaagcgagcgaggggggtgtcagctcgtgcgctgacaaaggacagggatgaaaggggaagagaacgtacgctgacggcagacggggcagaaccagccctttgccttgcgccgccggcgggcctcctgccgcgcctgctgggccgcgtcgacccgaacctcacccgagcccgccccagcctccgtcggcgtcgtcgcctcgccagcgaccgcagttgccccacctgctccaccctcggtcgtctccgcgccgccgagctcgcctcctccttcctcgcggcgcatcaccttcccgcccgcgccaaactcgaccatcccgaccgcgcactccttgcaaacgacgaggtgccggcacggcaggaggacgacgtcgcggggagagacgaggcagacgatgcactcgttgggcgcgttggccgcctggaagaggtcctcggcctgggccgaggcgggcgggtaggcggcgggcgcgggctcagaggccggcgccgtcgacgacgtcaggccaaagatttccttgagctggaacgtgtggttgccgatctgtggcggcgagaatcggaagaggtcagcaacgtcgggcaaattagaggcagatcagaagagaatgaggggcccgcacgagtgcctcacggcggacaaccttggccgtccagtagtccttcttgacgacagcagcctcggcagcaacgacggcggtcgtgacaccgtcggggccgacctcgagcgggggctcgacagtggcggccgaagcctcggtcgtgggatcgacggtggcggcagcggcgggcgtcgccgggtgaaacgatatgtcgacgtgcgtccgctgggcgttcatctcggcgagggcctcgcctgccgaatttcaaaagcagagcgagtcaagaagagagagaacaagtcattcgtcagcgggaggcagtcaatgctgatcgccagtcgaaaggggtaagggtgacgcaccccgctcgccacgagcctcgagacggacgaccaggcggacgtccttccggaccgaaggcttcttcggtgcgtcgtccggtcctcccttcgacaggttgagagccgtcatctggaccgtctggctctcaacgtcgtcctcgggccgagccgggcggagccagcggccgagcgggcctcctcggcgggattcggcctgagtcggtgcctgagtggtctcgccgcccttcttcgtcgtcgcgaggtcgtcctccgactggcgctcctgccattcttcgaccttgcgaacagcgtcctggacctggacctggcacgcaacgaggtcaagcgcagcgtcctcgggcagggcccacgacttgccaaagccaccgcggatgacggcctggtagacgacctcctcggtcagggccgtgtggctggccggcgtcggcgtcggcaggtagaggtgaagcgtcagcagcgcctggggcgcagagaggtcgtatgtgaacttgagcgagtgcttggccgccggcgaggtcgagacgggcgcgagatggagcgtcggccgcttgagattgacgagcgactgaagcgtcgtcgtcgggtgaggctgcgatcggcggggaacatgtcagcctgctgagagagagatgcaattggcgagagacggccggacttcggacgtgttggctttagccttctcgacccaggccttaaccgtctcgacgccgacccgctcgcgctggcggcccttctcctgaacgccgtcgtcagcctcgtcctcgccatcgtcgccgccgatcacaggcccaaagagcgtctcgcggccttggctgtccgtctcgccgctgccgccgacggcgttgccggcctgctggttggcggccgcgccgctcccgatctgggcggccgcttgggcctggatgtcggccgggacggtgaggccggacgagaagggaccccggcgggcgagcgtccgtgagagcgaggacgagccccagccaaaggcggatgcgcgcggttgggcgcgggcagtggtcgacatgaagcttagaaggatgaggcaggaaaggaagggagggggttggtggtcggtggcaagagggagcgggcgaagaaggccctccttcgatcccaccctcgtgctcttggccctggcggcgtcggcccgtcggccgcttggccaaagcgacgacccgccggtgccgctcgagccgacccccgtcggaacggcggccatgggcagtagtcaggcatgaagcgggactctttagcttcagagacagtcacaagcacttctacctcctgtctgtcgtcgacgagccaagacggtcgaccctcgctgtcgtcgtccggcccggcttcaggctgctgcggaggcagcagcttgcggcgtctcgtcaacggcgcccgactcgaccctcgccccctcgtcgcagcccagcaacaacaatgtcgtccctgtgttgcctcgaaaatagagggcaggaccggttgctagctgagcatagcagcttagaacgatcctgcagaggtgcagggggaggtccactcccctccgacctcatcgggcttcggctgcgcgagtcctgatttggcgctttgacgagagctggccaacgtcgtcaacctcgccttctgtcatccaacacctgcagtcccacctctgacctcttcgacctcggcagactcgcgcgctcgatgtcgtggctgatcccctcttgtgagcgtctctctgatggataccgtcctcacgcgggcggtagcctcttctgacctcctcccgcctcgctcacgcagtgccgagcttcctttcgacgacgcctacggtcgtcgctcctgcagccgacctcgaggccgaggaagacgacgacgacgacgcgcctcctccgttcccgcttccggagtcgcatcagcgctcgtcgtcgtcggcccagccaacctctgctcttgctcctccaccaccgccaccgccaccgccgagcttcaccgtgacggctcctccgccggcgccggacctccgcaacccgctcgaattcaccgacgacgacttcaattacgacgagcctcctcctccgcgcaaggcaaagagcggcaggtcggcgggcttagcgacgccgacgacgacgaccaaggtcatcaagacccgcgagaaggtcgcgctcgagccgggccatagcgcgctcgactggagccgcgtccaaaagagtggcatgtggcagggcgcgccgctacgagtgcgccgccttaccgaccgagctgctgtcgcgttgttcagttgctcagccagcgggctgacccctacgcttgaacctgcagggcgccaacctcccttaccacccgatccgagtgacaccttcgctccttgccgcacacaaggatgcctcaaagggcgaccagtggacggcgatcaacggccgggtctacaacctgacgccgtacgccaattttcacccgggcggaatcaaggagctcatgcgctgcgccgggagggacggcacgaaactcttcagtgcgtttccgatccgagaggcctccgttgcgtctcgcgctgattcgccttccgtttgatctgttgcgaacgttcagtggcgacgcatgcctgggtcaaccccgagttcatgatggagggctgtcttgtcgggatgatggtcggcgagtgattgtctgccgttaccgcatgacgcagcggccaaggaaggtcgacgaactccgcgacgagcccttggcgatgcttgcgggcagccgccgggcagcctccgtgttcagggctctctgtcaaatgcgccaggccgctgtgtcgcccgcccgcttgcacgtggccggtgacgcccaagggcgttgctcaacagtcaagaacgactactcctcccttcgccaactcgctcgcccgatgcgagagcctccaccgcggtgtgcaacagaccgcctccttgtccttaaacttcgagcagacgtcgaagaggctccttgctatagatggtaacccctgctcctttacttgagcggctggtcccgcttgcgctcaaactcccaggccgagctgtcctctgcccgggctggaatctcgctctgaccctcccactttcccgttggcgaaaggtcgtatcgcttgacgatgtttggcccgtacgggtgggcctcgccctggaagaccttaagccgggcgagacgcaggctgcggagtcggttctttggcagcatgcgcgagacggcgtgggcgatgacctgagcagagcatcgtttgcgtcgggtagacagatgaggaagcgggttatccgaaggggcgacgggtcagcagctggttccgaacgaggagcagcgcggagcaggcagcacgcacgtcttccggccggcgctccatcgtcatacggaacgacatgtgtctcgagttgccggggaacgtcgactgcttgaagtagctgcactcggcgagatcgagaggtgaaggaggtcagtcgatgctgacccgctgctggtcgagacggatgaggggcaagcggacgcactgcttctgctgcggtttcttgcccgagaggaacaccttctcgcagttggtgacgacgacgtagtctccgacgtccgctagagtgtgtcaggtgctgcacgtcagctcatcgtctagccgatcaaggcctcaccttgtggcacagcaggaacaccaggggtaggagcggacgctctcgcgcgccggccaggaagaatgaagagactgacttccgcggtcaaagatgggcttgtgcttgcccatgaggacgatggcgatccgagcggcgaccttgcctgcaagatcatcaagggcaaagaaggagggaagcgttagggtcagcaggactggcggccgcgagaggcggtcgcggagcaagcagacaggacgggacgaaccgagcgtgcggttttggaggtcgacctggtgccacaatcgggccgttccgagcgaaggattcgagaagacctgcgacatggccagaactgaggagagaagaaggggggaaagggccgggcaagggggtgtggaagtcgggagctcggagtcggcggcagcggagggcaagaagggcggggcgacggcgacggcctgcccgaccaacggccacctgctctcctgcccaccccttttgcttttcctcttacgacagttctgcggtcgttcccgaggcagctaggatgcccaagtactactgcgacgtgagttttgtcatcaggtcgaccgtttggaggccaagcccggcgggcagcgagctgaccctcccatccgtgccttgccttcccccctcccccccggcatgccagtactgcgatgtcttcctgtcagtcggcctgttttgcagtttgctctgtcgttgcggggatgctgacgatgctgcggctgctcttaccttctcaggacgcacgactctgcttcgggtccgtctggaggcgtgcaagatggctgtccggccgaggctgacctgcggctcaaccccaccttccctctgcctcgccgacagtccgcaaggcccacaattctggccggaaccacctgcaaaacatccgcgactactatgcgtgtatgtctgtctgtcctggttgctggcgtgcgcgagagagctaaccagcatcgcgccctcagccctcggccatgacaaggcccaggacgagatcgaccggatcattaaccagcacacgagtggcccgccgaggatgggtgggatggggccgccgatgggtatgggaagcatgcggtacgtttctcaacatcgaatagagcgcggctgcccctccgacgcgccgctgacgagcttgttgcaaccgccaggatgggcccaggcttcatgaaccctcagggcggaccctttggcggcccgcctcagggcggcatgggccgtccaatgggcggtccgggtcagtaccagcctcagccgttccagccgtcgccgtacggaggtggcccgcctccgccggggggtggccctcctggcggtggtcctggcggctacggccagcagcacatgcccccgccgcacatggccatgaatggcggcggtccgcctctgccgacgatgccgcctcagggtggtcctggaggatatggctcgcctgcgttaggtggctacggctcgcccgcgccgggcggctacggtggtcctcccggaccgggaggctttggctcgcccgccccgggagggtacggctcgcctgcaccaccgcctggagcgtacggctcgcctggacctggaccaggaggctatggcggaggccctcctcctcctcagccgtccttcaacccgccgccgccggcgcaaaacggctacccctcgcccggtcagcagggcggcatgccgcctcggccgtcgttcctcccgccgccgaccctcggtggaggcgccggcgcaccgccgccgcccttcaacccggccgcggccggaccgatgaacccagagcgggcacggctgctcggcatccagtgaacgagcggacattcgggctcgcacgcggaaccttgtacgaccaacagctgggcaggcgggtagggacgacctgtctaagggacgacaaatgcgccctttctctttgcaagcagcagcaggtgctcagcacttctctcgcagaatttgtctcttgggtgccagggtcaggggcagggcggtgcaaagggacagggggccaaccagagcgccggccgatcggctcgccgcctgagcgtaacgactctgacgccctcgtttcgtttcgagctctcccaccctgctcctgacttgactcgacacacggcctgtactctcgcactctcgctcttccggttcctctctctctctcttctctcttccaaaagtcactctttagcggacacccccaaaagaagccgcagaatgcagcgcttcctccgcgcgtcaacgagctctcgggcagggtcgtgcccgcagctcgccagcagcagtcgtccgccttcttccttgctccttcggtcgcctcttcctgtagcagcgcctgtagcagcgcctgtggctgctcgcagctcgccagcgctcttgccggcgttcgcttcccgccgggccttctcaacaagtccccgccggcaagcgtcgatcgaaccctcgacgccggtgctcgacgacacgggcgcgccggcgctctcgcacatccggacgctggccgtcattgcgcacgtcgaccatgtcggtagctcgttcttggccgttgctgctgaaggcacgctcgagctgagggctgatccttgcctgccgctttgctcctcgccaccgtgctcagggcaagacctcgctcgtcgaccagctcttgcgccagtcggggacgatcaagaagctctcggacaactcgctgctcggcatgagcggcgcccaggcagatgacggctttgtcacacgcgcaatggactcgaacgatctcgagaaggagcgaggtcggtcgctgctttacgtctttggctgggcggctcaatctggcgggagacgctgagctgcttccttggcccacttgcgcaggtatcacgattctgtccaagtgcacgaggtgcgcccgagctgctgtcgagggagaggcgttaccgcccgtagacccaattgacgtcgtctccgtctccgttcgttctttgcagtgtcgtctacaattcacacctcatcaagtgcgtctgcgtcttgctgcgcccggcgctctgccggcagcactgacgctcgtaagcttcctcgcacagcatcgtcgacacgcccggccatgctgactttggtggagaggtcgagcgcgttctgtcgatggttgacggcgtccttctcgtcgtcgatgcgaccgagggtccctcgacgcagacgcgcttcgtcctcggcaaggcgctcgccgccggcctcaagtgcgtctatcacttcaggttgtcgacgcttcaggtggccgctgactcgctcctttgcaggccgatcgttgtcatgaacaaagcggaccgatcgacggccaagcccgagcaggtcgactcggacctctttgacctctttgcgacgctcggcgcgagcgacgagcagatggagtaccccctgatctttgcctcggccaagcagggctgggcctcgctcaaggcgcccgagaagccgaaagccgacaccgagtcgaccaacatcgcgcccgccgacgacatgatccagctctttgacttgatcctccaggaggtcccggcaccgacgcggctctcgcgcgagaagcccttctcgatgctaacgacgcagatcgaccacgacccttatgtcggcatgctgtacttaggccgggtcgagagcgggctcctcaaggtcggcgacaagctggtcgccctcgcgccggacggcacaaagcagggcgagggcaaggtcaccaagatctttggccgcatcggcctcgagaaggctgtcgtcgagcaggccggcgctggcgagattgtcagcatcgccggcatctccaagggcggcgtcaactgcacgctcgtctcggtcgacgagcccaacccgcaggcgctcccggtacgtcccccgtcgatcgtcgctcctgctagtctgaccctcctctcccgatcctctggcagtcgacgccgctcgacccaccaactgtctcgatgtttgtgtcgccgaacgactcgccgttcgccggcaaggagggcaccaagctgacggctgccgtcatcaaggagcgcctgttcaaggaggccgagaccaacgtcgcgctcaaggtcattgaggacctgcgctcggccgaatcgctcgagatccgcggtcgcggcgtcctgcacctcggtatcctgctcgaggagctccggcgcgagggcttcgagctcgccgtctcgccgccgaagccggtcctcaaacgggacccggagaccaagcaggttatggagccgatcgaggaggcgacgatcctcgtcgactcgcagtacattggcgtcgtcatcgagaagatgacgaagcgcaaggccgagatcctgacgtacgaggaggaggacggcaaggtcaaggttgtcatggaggtccccgcccgcggtctgctcggctatgtctcgggcgagttcaacaacgacgttcacggccagggcacgctcaaccacatcttcaaggcttacgaaccgttcaagggcgagatcatttcgtcccgcaagggctgcctcatctcgagcatccagggcgaggcctcggcgttcggcatcgccccgctccaggcccggggcacgatgtttgtcaagcccaaggaccagggtcggtcttccgacgctgatgagggatcatggtcgactagaagctgaccgaccgccgtctctgccgcgcccgctgtcgccagtctacgtcggcatggtcgtcggcgagtcgaccaagtccgagacgctcgagatcaacgtctgcaagaccaagcagctcaccaatatgcgcgctgccggcaaggatgacggcatcgtgcttgctccgccgcggacgatggtacgtcggccagccgcctgacctttgcccgtgccaaccggctgacgacctctatccccccggcctgcccgcagacgctcgaggaggccatctcatactgtgacgacgacgagctgatcgagattacgcccggcgcgattcgactccgcaagcgctacctcgacccgctctctcgcaagaagaacgccaacaaggtccaggacctcatcatttagacggcctcatcttttcctcgttttgtagacacgccgccccctttagagagcgagccacccggacccacacgcacccatcaacaccacctacctctatcccatgagacccgcatccggagtcttgccagcctctgccgtcgtcgtccgctgcgaatggctgccgcgcctgtcgatctgtgtgtcgcgccgagagaagcgttggctgcgccggaggcgtgcgcaagagcgaccgtcagcccaagccccggcttggccgtcaacctccatcagcacctctgcctcacctcaacaacccttgacggctctcaaacctttgctcaaaagaaccaccggtcgcctttctacaagcccagacccctcgccgcctccgtctaaccgctgccggggccgccgtcgtcgtcgcccgtgatgtcgcttccctcgcatctgcgcgcgcacaaggacctgacgcgagacgagtcgacgcgcgagttcttcaacgcccccaagggcgacgatgccgggggtcagaagggcatggagatcaacgccgtactcagcatcgaaggcgaggccgtctttgtgagtctgactgctacttcgtttgagggagctcgagctgccgcgcctgcggccggcccggaaccgtcgccgggcgacgaggacgaagcttagacgtgcggccgacagggagagcgagcctcgcccaggccggatttctctggtcgctgaccgacggacctcgctgccggctctcgttcggcatggctttgctcgctcgacgcaggagagcaaccgaagctgacgagagctcgaccgacccctttccgcccgcaggccggacggctgtacctgctcccgccctacctgtgcttcatctcgctcgaccgccggtcggctcgcttcaccgtcccgctcttctgcatccgccgggtcgagaggctcaatagccgagccggcgtctttgcgctcggcatcggcctctggcacgggctgcgactggtgcgtgcgctcccggcctcggcccgtcagacgacgcacacgctccgagactgatgaccggcatgtcctctccccgagctcagatcctccaactcacgagcctgctaccgacggctgagcacttctgcattctcctccgcgacgcactccgggcgcaggtcagtccgagcgctcagctctgtgccctccggtcgagcctagcgttgaccacttacgtccctcgaccggccttctcaccacagctccctcagatgaagcttctcaagggctttacggcctctctctactccgagttccttctcgccgagaaggaggaggattcggcattaaacggcgcaactgagggcgacgcccgcggtccgggcggcgacggcaagggcacgtacgagcgagggttgggcgagctctttggtttccccggtgacgccaagaagctgcgcgagaagtccaagatcaggctctggaaggagtacctctcgagtgcgtccttcaggcgggagaacttgcgactgattcgcgctgaacgccagaggcgctaacgcgactcgtccgcgaccacagcccacggcagatctctcactcgtgcgtatatgcgactggcgcttcttgtcgccgctcttcacctggctgacataatctgctgccagtcctccgctatccgccgttccagcgcctgctgcaggtcggcctgccgtcacggatgcgcggcgaactctgggagacgctgtctggctcaatctgtgcgttctctgcttgtccgtacgcttggagtcaagcctgacacatatcacctgcttggaagacctgcgcttcgccaacccgggcgtttaccagaacatcctcgacgacaacaagggcaccatcacgtcggcgactgaggagattgagaaggacctctaccggtcgctgcccgagtacaaaggctttcagagcgaggagggcatcggcagtctccgccgcgtcctgacggcctactctttccggaaccccgagctcggctactgccaagcgatgaacatcctcgtcgcggcgatcctcatttacatgtcggaggagcaggcgttctggctgctcgaggtcctctgcgaccggctcctgccgggctactactcgccctcaatgcacggcacgctgctcgaccagcgtgtcttcgagtcgctcgtcggtcgctgcctgccgatgatcaccgaccacttcaagtcggtcgacgtccagctctcggtcgcctccctgccgtcagtcgcttcttttggccagccctcgagactgccgcgaccgactcacaaccttttcctcgctctttcgtacctccagatggttcctcagcctctacatcaactcgatgccgctcatctttgccttccggatcgtcgactgcttcatggcgatgggacccaaggtcctgtttcagatcggcctcggtgcgtcgtcgcatcgaccaaaggctgtctttgctcggtgggcatggctgatctgccccttcccttatctccagcgatcctcaagatcaacggcgaggccctgctcgaggtgacggacgatggcatgttcatcaagtgcggagcgaggcctgtcatatcaccaagccggccactcgagctcactctgcctctcctttacgcagcctgttccgtgcctactttgccactatcggtgactcggcgcacccagagcacgaggactcgcgcgtgcgcgcaatcaccaacttccaggagctgctcggtgagacttagcctttaggttgcgcaaagcaccgttgctctcagctgaccgccctcggcgactcgttgcgtgccctgctcagtcgtcgccttccgcgagtttagcacgatcacggaggagacgattacgacagagcgcaagcgctaccgggccgagatcgccgatgagatcgagtcgttctcgaagcgggcggccgtccgcaacctcaaggcccaccgcttcacgccggcccagacgtccatcatctacgacaagttcttcaacgccgtcgtttccgttgacccggctcgtgcgccgggcgacgtgacgccgccaaagccggcgcaagacgacgacggccgatccgaaacccggatcgacctgaggaccttccagtgcgttaggcgcagggaagctttgtctttctcacgtcaggacctgatgctgattcaaacgctccgtttccagcaccttcatctccgagattgtgacatgggcgcgcgaggagacggtcaccatcacgctcggctaccggcgagtcgaccgcaaagtggccgagcacgagctcatcaaccgcatcttcttctcgtgggaccgcgccatgaagggctcgctctcgctccaggatatcgtctcgggcctcaactcgatcatgggtgccggcctgatggacgcgatggagtggatcttcgccctgcacgtcagtcacggtctgcggcagactgaggacgctctcgcgccgtcactgacgcgctctcgctctcgcccgtctccgctctacaggaccgcgatcgcgacggcttcctcaccaaggtctgtcccacgatagctagctgccgcccgccactattgactgaccccgcttgccgtttgccgccacgcaggacgaggtgctgcagctgtccgagtcgctcctcttcattttccgcaatgagcctggcgatgcgttcctcgccgccgtctcaaagttcattctcaacgcctacgagtttggcgacgcgacgtcgcccgatgcgacgccggcgccgacgaccgcctcgcccgacgaccaggaggacctcgtctcaatcgagtcgccgaaaaacggatccgctgccgtcggccgctcgcgggcgagctcgaccgtctcgaccccaggccaccacagccggccgtacctctcgttggcgactttccggatggtcatccttgccgacgagctcctcgagggcttctttgagcgcgacctctcggcctcgtttcagctcgagccggtcggcaaatacagcaacaaggcggctgaagaggcgaagtcgggcctctggggcggcttcaagaacctcgtcctgacgaacgagaacctaacgacgttcaaccgcgtgcgtcggcggactcgcaggcaggcgagagtagcacttcttactgacgcaacgcttcccgacctgtcggttccagctggctgatggtgtcggcgctcggctcggccgtcacgaggtgcgtccggctgcatcaggcacgacacacatgtggcaatcactgacacgcttccacgatcccttgctcccctaggtcgttcaccagccgtcgatcgccaaggccgacagcgccgtccttccagtcgtcgagccccgacgcggctcactcctctctgcgcagaactcgccgaacccggcagcggctcctgtccagcagcgtccggcgaccggctcgtcgacgagcctcctatctggcgaaggggcgacgtcgacgagcgcagagcccgagatcatgaggccgatggccgccgtcgaccgggtgactgaggccgtcatggagcgccagcggttcgcgatcgacgagatcggcgacgatgatgacgatgacgacgacgatgctggagagggcgaggacgacgacgacgtgatggacgaggtgcgtcgagagagacagtcgcctgccatggctgcccgaatctgaccgcctccttcctgcgctcaaaccccaggtcgaggccttcctcaaggcaaacgacggcgaagacacggcgctgaccggcaaggacaaggaggctgccgaggcgctgctccgggccgaaccgatgaaggagttctgagtaatcctgcgctggcgccgaccgacatgcacctctctcgtgcgtcgctccttggagggcggtgcgtacgctcagccggcccccttatcactctcttttttttgccgccggccagtcgccgcgcctgtcactaccctctctcaccctgctacccacacccacacaccctgctctgccactattcttgcatgcgagtcgacttcgagagcggttgctaagggaggtcgctagggagagggtgacaggccgacttagggttaacgagaagttcaaactccgccgctgcgagagttggccgcccgccgggcgctcggtttttcttcgactcggcttgccgagctcgcccttgctccttcgtccctcaccctcgatcctcttcaagcactgtacgtcggcccctgagctctcgagacgctcctttgcgggctgccgagctgaccagtgcccttcttctccctctggtctcgctctcggctcgccgtttcccagtcacaatggctgtgagtgtcgcctttcgcccgggcctttggtcgtccgaccctgagctgccgcccttgctgacccttgctctttcccttgtttcttatgtgcagcccaagaagactgtcaagaccaccgaggacgtccccgtctcgttcggaccccaggtcgctgagggcgagctcgtctttggtgtcgcccggatcttcgcgtcgtgcgtctccgcccggcggccctctcgccggcgccctgccgctgagagcaccgtcctgaccacgccctcgacccgcctctccttcgcagcttcaacgacacctttgtccacgtcaccgacctgtcgggcaaggagaccatctcgcgcatcactggtggcatgcaggtcaaggccgaccgtgacgagtcgtcgccctacgccgcgatgcttgccgcccagaagtgcgccgagcgctgcaaggagattggcatcaccgccctccacatcaagatccgcgccaccggtggaactggcaccaagacccccggccccggtgcccagtcggccctccgcgcccttgcccgctcgggcatgcgcattggccgcatcgaggatgtcactccggtcccctccgactgcacccgtcgcaagggcggtcgtcgtggacgtcgtctgtaattcttgtcgcaagacaacctttacagagagcgggatttttcgtctccgagtgatcgcccctggtcgtcttctcgtcggccggtgttatctcaagagatgctttcccaacccacccacaatgtcgctcagccacaggctcctttcgcaggcccctggtgtgctcttcatgctccttacgctgccattgagcctcttgaccgaagttctcgaagtttttctgcaagccgtctaggggagcaagagaggtcgggtcacgtcggcaaaggccagtcacggatgctgcgatgctggatgcacgaccacctgggcaacaatcgtagccctctgtatccgagggtctgatctgtgaggacgagcaacagggcagggactgagagggcggtcagagcaggtgtcggttgtggccgacggagggcgcagcagcagaggcaccggcctgaccagcccatcaattgtccgttcagtcgcaacacagatccaccatcagagcagccctggaagcaagccgatgatagcgtagaagtcgcctcttggtcatcgtgccaacttgccttctgggcgggaaacagcacaaaggggctcggcttggcagcttcagccggggctcgcagcgccggcgaccttccgcatcttgagttcgatggtaagctggatgggaaaggcatgaagtgcaaggcttgcagctcggcgaccagtatggcaatgaacaagggtgatgggcatcctcaccctctgacgaagaaaggtcgtgtgcgcacagcagtgcccggccgttagcgacggggcgaccgacgatctgagctgagcagcgagcagacaattcggtcgagacgcttttatgctgccggtcgggtctggagcttggcaccgacccatgcttgccgagctggcggacgacgtcgtgcttcaagcagagcgtctggcggaggctggggtcgtcgcatcgcaagtacctacgcacctcgcgtaggccgataagtggatgagagaggtggaggcgaacttgcgcagcagcgcgaccccgatggccgaacgcctcggtcgacaagctacaaaagccagctcgccagctcgccattttcttctcttatctcatctcactcccttcttctcatgcaccccctcacctcttcccatcactctagcatcacagccgaccatgtccttccctgccaactccgacaaggtctgtcggtcggaagcgcgaccctccatctctccgctaacttgaaccctctcaccgcagaacacgatgagcgaggaggtcgccgagcactttaagaccgccatccagggcaagaacatcctcatcacgggtgcatcgccaaaaggcctcgttgccgcctttgcccaggccgtcagccggcactcgcccggtgttctcgtcctcgccggccggacgcagaaggcagtggacaagacgaaggccgagctgcccaaggagacgtccaacctggacgtccgtctcctcatcgtcgaccttgcctagctcgattcaatccgcaaggctgcggccgagatcctcgcctacgaggagaacgtcgacatctttgtcgccaatgctggcgtcatgggcaccgccgagggcaagacggagcatggtacgccctgcctgatgtcgctcgaaggatggcgacagctgctgacccgatcaaacgtgcacgtttgcaggcatcgagacgcagtttggcgtcaaccacgtcgggccgttcctctttacgaacctcttgctcgagggctcgtccaagtccaagcctgcgcccaagcgcatcgtcgtcgtttcgtcgggcgcccagcagctctttccggcaggcgtcaactttgcgcagccgggctatgtcctcggcaagaaggacgtctacaacaaatgggtcgcctatggccagtccaaggcggccaacgtcctgctcgctgcagcgcttcaccggcggggttacgaggccgtctcgcttcactcgtgcgttatccaaacctcgctcaccaggcacatgagcgaggacgactaccgcagcgccggtacgtcggactgtcgttgaccatgaacggacatggctgacaagttctgaatcactaggctgggtcaacgaggacgggtcggtcaacactgccatcgagctcaagtcggtctctcacggcgcggcgacgtacgtccctctctcacctcgagtcttttgctaaagctggcctgacccccatcgactattgatattgcaggcacatggtcgccgcctttgcgccctcggcagatctcttcccggccggagctccggccccttacctgaacgactgccagatcgcgctcgaccacgtcgactcgacggcaaagggcgacaagcaggaggaggagctttggaaactctcggaacagctcgtcggccgcagctttgcttagctatgatttcgatgctcttgttgtacaatcaatggctggcaggcgcttcctgcaggcagcctcagtctcagcgcagcacgtgagcgagagccagatccatagagacaagcaggaagcggtagcgaagggaaaggagacactataaccgagaggaggatgctgaaggcgggcagcatgcggcatcagctcggcatttggatccccagtcgtgcggacattgactcaccagacgttaggtcagactagttcaagctccgcccgtgggcgccgagcccgacgacggagtgacgccccgcgcgccgcgaggcccgccaacccgaggtcctcgaggcccgccaaccgagagggaggagggcttgcgctgctcgacactcgacttgcgaggtgtcaccgactcggtcggcccgccctcagcaggcggcgagaacggctggtcggtcgctgacatcgagtgcgcgagtgtagccccgtcgttagcgtcgtccttgaccggcgcaaagactggcggccggtcgtcgtcctcgtctttcggtggagtgaaggttggcggccggtcgtcgtcatcgtctggcggggagaagggcttgtcctgggtagctggcggggcagccggagagaccgagctggcttcggcgctctcgtccggtggggtgaaggcgctgtcctgcgcattctggaaggcaggctgcggcccattgtcaacgaccggcgtcggcggctgcaccatgaagccggccggcagctcggcatcctgctccttctggatccggagcttggtgagcgagacgcgccgtgacgactcgacccgctcacggatctgctcgtctgactcgtgccgagccgagttttcgttgagcgacacggtccgccggcctggtgagggcggcatgcccggcaagccgggcgagttggcgccgcctgcgatcagctgcgcctggacgttggcccgctcgtcgtccgtgactgcaagtgcgtgcacgcaaagtcagcgggctgcaggggaaaccgaagcggcacagagacctacgcatcgagcgcgacggacgaaggtcgatcggccgcgtgttgcgccgcgccggcttcggcttgtcgacctcagcccgacgagcggcaatgacgccagggaagacgtcgctgtggtggcggatcatgtcggcaacgcacgcggccggagcgcggtccccgatcgagagcgacgtgtcgaggtctggccggatgatggcccggccgagcgaatagccgagcttcgagagatacgtctcatccggctcggtgctgctggtttcgtcgacgaggctgaagagtgcacgccccctgagttagtcgagcccgcgactggcctggcgtgatggtaggttcggacgctcaccttcgcagatgactgatgatgccgtcgaggatgataagccggaccttcgggatccgtccgagcaggctcttgagctcctcgacgcgctgcgcctgggcctccttgtcgccagcgccgatcgacgggtagaccgccttgacgtcgtcgtagtcggggccgagagggacgccgagctcgagcagccagagcctgttaagcgaccggtcagttgtctgtcacccaagaagaaacgtcagggggctacgacgtaccggagggtggctgcgatcactggcaagtcacgccgctgaagcacggccgccggcacgtctgccgcgccgttcggcagcgagacgagcgcgtcacgtacggaatgagtcgcctgcagcggaacctcgtagacccacgtcttgcggcgctctgtttgcaggcgggggaagctagaggtcaggcaatgccttgcatggcaagaggttacgtctggcactgaccttcgtcgtctgggaggtcggcgtagccagtcttgagccggttgagcagagcccggacgaccgggtggaggagtgcgccatcctcggcctcatgttccttctcgccaggcagcttccaatcaatgccctcggcccagcggaaaacgtcgccgccaaagacggtgtcaaccttggcgtcggcaaagggctcgtagacgtcgaccaggggccggaaggtgcccgttcggtaacgctggatgagcgcgtcgaggtccgaggcgggcgagtaggcgtcgagcaggaggtcgctcgtctcgaacgacggctgaagcgcgccagggagagcggcctggagacgctggtactccttgagaacagtccggacggccgagaggcggtcggcctcccaccgctggaggacgacgaggccctcctgcacgatctcttccatccgggttcgggtccgatcgagcttgcggacagccgtccggtagacgccctcaatgtggtcggcctcccgccgggcacggacgtgcaatgcgacagtctgctggctgctgccgctcgcgccggcggcagagctgaacgtcgccgagaggatcgagcccgagcgggcgagcagtgaggcaccggcagcagggcctactgccgcagcgggcgacattggctcggcctgagcgtgaagcggcttgccggtgaactggtagtactcctcgtcccggccccaggagcccttgccgacggcgacaacgcggcggacgacgccgaaactctcgacgagcgcccgcgcagcctcggccgccatctcgctgtcgcctccgaagccttcgacgttcttctggagatagccgatgagctcgtagccggcaaagcagccctcatactcgccgaggatcggcaggtggatcgtccggagcgcgagcgtctcgcgcgcgttgtcgatgagctcggccgccttccaggccggcagggcgagcccggcgagcaggaaggtcggcggaccggcggccgcagccgtcggtgtagcgctgaaagccgtcttgaccgcaagcgacggcttctctggcgctccgccggttgatgtcggctgctcgagatcggccgaagttggcggcgaggggcttgaggcgcccgtcgaaggctccttctcgggcacggccggcggtgccgtctcgccgaactgccgcttgatgttgtttgtgatgcgctcagacagctaaggtgcgaagtcgatgctgtcagcaaggagaggggctctgccgcacgagaagatgagacgcaccgtcatcgagcgccgcagcccagcctgagccccgtcggaagcgcctgagctcgtcgagctggccgcgtcggggctagggacctgacctcctggagcagagaagcgcgcgctggacagaccgcacgggccagcgagtcagctcgggcgagatgtaggagggaccaagacgggctacgtactcggcctcagcaacctctgcactccgtgccttctcgccccggagcaccttgagcttgcgcacgtcttcgcgctgggcctcccaagctccgacccagctgtcgaggacgacgcggcgcgagtcggccagccggctccggtgctcgtccgtccatttggcgaacggcagctcgacgagttccgagagcgagcgggccagctggaggtgcgctttgccctgtgccttggcctgggctgcagggggaagacgtcgaaggccggtcagctcccatgcgagcgggccgaactcgggcctgctcaccctcgaggcctcggaaggtgaactggaggccggcgccctcgtcccggtcaaagccggtcggcttcttgctggatgaggcggtccggttgatctgggagagcgcaaagtccttcgtcgtcgtcgcgcggtggtggaggaagtcgatgacctgctcgttttcctcgacaccctaagcgagcacaaggaggaggtcggagcgtcagctcccggtcaagaggagggctgccgggtgagggtgcgagtggccaaacctgttctagctttgtgtagaggacttcgagaccggttcggtagtcctaaattaggtagaaggcaatcgcgatgtcagcttgttgcttcgagcagggctcgtaggaaggcaggggggtcgggcggtgatgaccatctcacgcttgctcggccggcctagctcgcgccagcccgacgctctaggaaaaagcggactcacgtgcgaccagaagctgctcgcgaacgagagcggcggagcgaccgacggcatggctgagagctacgtggtgatgtcgagaggtcgagaagcgagggtgagcgtacggaggagacaaggagagcttgccagagggcgtctcgctctccaggctctccttccgcctcgcgcagcagacgcgcccaagctcttcgcggccgggcgggcaggacgttgagagcagcctgcctcgtcggctctgccgccttcagcgaccggagcaggatgagcatctactgggctcgtccgcacctgtccctgcagatgcagaccgaggcacgaggaggactgcgttgcgcggcgctcgtctcgctggcaacgcagacaggcagcagcagcttcgactggtcagcgcgctgacgacccgacgcagcccgacctcccgacggcatcctcctttttcctcctcggtcgtcggcccgacaagctggcctgcctgaagcacttgagcaggaagcatgcaagctcacgagatggtcatccgactgatctctctgtcgacgcgactactgctgccgttgctcgtccggagcagaggccgggggtgacgacgacgcccagacaagggaaggccgctgcggaaggcggggcacaaggaggcctcctctctcaaatcagggactcgacgggccccttcgtcctctgacggccactactccttcagctcctcgttcggcccgttaccttctcgctccttcctccagcagctcgtcgagacgcgcgccggtcgccgcctccccccgccccagcccgcaggacctcaagcgcagtcgatcccgacaagcctctgcggggctgggccggctgtcaactcggtcatacgcgacgccgccgccttctcgagcttatggtcgctgtgttgtcttggctggccgctggccgggagcgcaggcgacggctcctccgaacagctgtcctcggcggcgcgctcctgacgtctgtgctgctgacgcttcacctgtcgctcccggacgacaatggcctgcgcgggacgctcctgcttccctttgagcggtctgcggtcgcggcggctcccaatgtcgacgtctggtcgcaggtcgactcgcaggttggacacggccaggccggcgtcgacccttccagctggctgctccctaacttaacggggcccgacctccggcgcacctaccgtgtcttgcagccgacggctcagcccgattattgcgcgcctgaggccggcgtcgtcccggccggtatcctccctgacagctgcctcgaaaggtggctcggccgcggccaagcttgcgaaccagacgaggtgaccgacaaggcaggcgacctcgacatcgtctggacctgggtcaacggtgagtcctgcctcgagtaattgctagtcgtgcgaggtgctgaatcgaccgccctggtcctcgcaggctcggatccggcttggcatgctcaattcgcccactttgccgaccctaccgtgacttcgatgcccgatggctttggcgtcccgccgatccggcactaccgcgtcaaggtcggtctctgctcctgagcgacgggtgtgcctttcgtgcgactgacgcaactcgatctcgcctttccttgcaggaggagctcaagcactcgctccgatccgtcttccaggagatgggcatccacggcgacgtccggacgttccacctcgtcctcggtgactgggcgctcggcggcgatacgacgccggtcgtcgacgagttcttcggcaccgaccacgctgctcgtagcgcccacgatcaaggccgcgagtggcgagtcggccagatgccggcgtggctagacgccagcctgctcgggctcgagcgcgcgggcttgacggtcaaagtccaccaccacgccgagaccttcaaggatcgaaccgccaccgacgaggaggccgccctccgctaccggaccgaggccctgcctaacttcaacgcgtacggctgccgctctcgctttgactcgtcgccttgcgctgatggcctccttcactcaccagcttcgcgatcgaggcccagctcgtcaacatccccggcctggcgccaaacttcatctacttcaacgacgacttcttcctgacgagcaaggtacgtgtcctgccttccgttcacgtaggctcagtgtgactgaccgctctgctctgttgaccgaccaccagcactcgaaagccgattactacaccccgctccttggcccggtcctcgccttcatttctgaggccgtcattccgttcgaggagtttcccgagacggcatgcgctggggaatggagcgccatgttgcggaccaactggcttctgggtgcgtcggcagtcagtctaaactgtagagccaggctgctgacgacgtctctttcctgcaggccgccgatttggtgaccgcaagcggctgggcctccagcacatctcgaaggtcttctcgcgagcggtgatggaggagagtgcgcagatctgggcgaccgactatgctcgctcgacccgccgacgcttccgcgaggtcgaccgcgggccgagcgacgagagccgcatcggcgacttgcatgcgacgtggatggccagcagcctcatggtcgagcgctcgcgcgagtcgatgctctgggcctgggcgtgagtctctttcgatctcgtcgacgtgctcatcgctctggctgattgtcaacgctcttggcatcactccagcgtcgcccgcctcgggggcctcaacggcatctggtcgaccgccgcgcgcgaagagattgccgagatctttggcgtcaacacgagcgcccgggaagggttcatagccgccttcagtcggacggtccgcgatacgctcgctctcgagacattgacggcgacgatgcgcagcatgggcctgaacatcccgcttacgacgcggtatctctgggcttctgtcgacggcgccgcgcccaacgaccaccgggtcacccgcgggccagacacggctcggctcgacctctgcttcggctccttctggaccgagcaagtcgacgcctcggccgccgagatgttcaagcgcatcgcctttgcgcatcggacctgcggcgaccagagtgggttttccttattcgactggcgatctctctgagctgactcccttgttccctcgcgcgtactccagtcctcgcagcgctcgtcaaccaatcgggtcgagccggcctttcggcgctactccctccggccggcgtcacgctcccaatcgccgacccgcttccagtcaccctccaggcgcacatgccgctgacgaagacgtggaaggcgaccgactttaacctccgggctgtcatccgctcgcacggggctgaggtcgacctcaggacctgggccctccgcctgctcgcccgctaccagtatacttcgggtgcgtgtgctgcagctctctccccgccttcgcctgcgacccccatctgatctcacctactcctctcgcaggcgagtcgctgtatcaattcacgcagatgatccgcccagaggacatcgattcggttcgcaagatcgacgaacccggctcgaccgtcagcgggctcgcgctcaacgacgacatcgagggcagcgaggcagagcaggagcgttcagtcctggcgatcaagtgtgttctcctgcactcgctgcttgcagcctcacctgcgctgacatttctctcgctgtttccgcaggacatacctgcgcgagcgatggcccgtccctggctggtacgagcggccgacgtagccgcctctacacgtcgtccctcggccaaaacctctcgactgcctcgcggcaagcctgcagctacctcggctctggttgcccctcgcccgtcatcccccccattttgcctttatgccacgcgatcggcacaaagcggcctggcagacaggcgacagttctaggcggcagagacgcaggatacgaggggacaagggtcatgaagaggcagggactgctcatgctagcaataggacgggccagccaccgtcggggacaaggcgcggcctcgggtggccgggcagcttatcattgcgctcacgtggagaacgacccggagggcgtcagcggagagtctgacacagagatgcatcgcagtcagacgcatgcacactttcgatcaaggccttccttctcctggtagccgatcacgaaacagacgcgcgcaatgagacgtcgtccgcagcggtcccgctgacggccacccagtcaaccgaggacgtcaagctctagcgctcgtgttctccttcttctcaccaggcgaccttctgccgacatcacactcgctcgaatcctcatctcacctgcttatcgaatttaacgattgacatgtgcttcttcgaaaggcgagcaaggagcgagccgaagaacagaatcagcgtagtgctgcgccgcgagcaggaagttaggctcgaccggcgccagctagctcatgttacccgacagagtcggccctcgcaactcgtcctacgtgtgcggcgtgaatcggaaagatggcatgaaaacgtcggatgtcggggccgtggcggaatgacggtcacgcatggatgtgatgacgaatggctagtcaagtgcaggaggccaaaggaatcgtattgccgcgccgccgtcgcccttgttctctgctgaatcgggcctaccagtcgtcgtccgagtcagagtacctgtagttggccctctataagcccgggttgcctacaactgttgcacagaaacagaagtccgaggtcagtgcctcgttcgagaagggaggctctggcgcgaccaatcaccgtgggaccggcacacatccgctctgcctgagaccaacctgaagccgatcaagaggcagtagaactggccgcaaacgacgtcgatgcccaagaacagatacgcccggtcttccatgccatccccaatctcgcgcttaggtctgattgacctgctggggatggtcctgcggagccgctcgacgaggtcgaatcaggcctggtagacctgctcgacagtgaggccagttgggttgtcgaccttggtctcggggggggggggtccggttcctcgcagacgaagcggacgtagaacgcagtcggggctggagtggttgcacgctcgagccgggctgggctgaagcacatcggcatcggctcggtccgcagagaacctgggacgtcgaagttccaggcccggcgctgggtgatcatgaggtcctcgtgcgactcgacctgccggacgtcgggcgccgcgttgacagcgagaagcgggtgctggacgacgtaggcctttttggtctcggcagagtcaatgaacgtgaaccgggagtcgaggttgcggaggcgggccttgatcgccacgtcgtccggcttgccatggaaggagatggcgtcgagcgacgggtcgaaaaagaggtcgcggaaggccttggagacgcgctggggccggcggagcgtcttgtaatcgaccttgccgaggacctcgagccagagctcgggcgggcggaccggggtcgacatgctgggcgcacaggcgaggacgttgcaaaggttctggagagaggagggcggcgaggtgagtgtcgagggtgagcgtcgagggcgaaggcggatggaagaagagatcaactgctgccgccgttgctgcgccccctcgccagactcgacagacgcgctgcgcacgcccggcgcgccacgacacgtgtcaagagcaagaggaggctcatcgtcgagtcgagtcttccggggactcgagctggtatcacaacgagaaaggggaggaggaacgagagggaaaggagcgtgctggttatggtatagcggttctgagtgcaggttccgagaaaggggctacaagaagagagagggggggggggggctcggccggccgaagttcagtagtgttgtgagtaagcgagtgagagagggcgtgctggtgagggagcgttggtaaatagagagccgtgggcttcggatgctgagtgtgagagacgagcgtgagggtcgagggaggagcccgctcaaagttgctgtatcgagttgaggaggaaagcgcgctcgtccatgaactgctcgtctgcgggtcggacaaagcagagcgtcatcagcggcggcgagacatagagatttaaaaagaggcgtggaaaggcgaccgaccctccttgtcgctgtgaaagtcctggaggaaggcgatcagcttgtccttgttgcgggcgaggatggcgacgattggaagcggcttgttcgggttggcaacaaagacctgctcgggcgataaaagtgaggcgggtgagagtcagcccgtgccccctccaaagcagggcggagcggcagacggtaccttgaagacgtgaaacgcctcaaattggatgtttcggctcttgtcgcgcaggaggttcatcatcatcttgaggttggtctcgctcgcaatgtagcgcgtcataaccttgtagtttgcccggtcgaggatgatttcgccgaggagcttaatcgactggcgcttcgtgacgtagtttgacgagaggacgagcgtcgtataggaggcgaagaactgcgccgaacatacccgatgaaggagctggacgtcagacaacgcgagagatcttgaacgccgccatttgagcaggaggacgcacccggtcatagttggcatcgaggtacgaggcgaccatcggcttatgctttgtgagcgtctcctttaagttgccaaaggcgtcacacgagatgccaaacgtcgtgctctcgatgtaggtcgggaacgagtagaacctggaagggcggtcagcggaccccatcctggcgtcggcagcaagaaccgacggccgggacgcactgctccgagtgcagcagcacctgcgcgagctgctcataccgcagcatctccttgaggatcatgcccgtgtttagcgcgacgtcttcattctcatacctgttccgatgacgcgcagtgcgcgcaattcaaaagttagcctaacgcgcaggttagggccaggagcgagagcgagaggaaagacggaccccttgagcgtcgcaaagacgacctgcggccgcttggtgatagcctcgactgtcgggaagcgtgagccaatctggcgccggaggaggacgttgaagatctgagtgacatccttcttggcctgtggatgtccgggcgaagagaggcggtttgtcgatcgtcggcaggggcagcggcgcgagcagagacgaaggcagaagaagcgggcgtcagcttactgtcagacaggcacctctgctcgcagcccgctgtgaggttggatcgagcggacgccaagaaggcaggacgagcgcctcgtcggcggcaagggcaaatcgagggcgcacctcaaactcaatgacgcctatccgctcgaccagcagcagcaagacgtcgtgcatgatcatctcttgcgcgagctgagcgacgacctcgggcgacggatcggtctctgtttgacgtcagtcaggagggtggcgggtcgagacgtcagccttcgggggcgggttgaccgtgttggggatgatgacgggcgggggggcgctgttggaagagccgctcggggcggcggcggcggcaggcgggggattggggttgggcatgaggagcggcgagagagcggtagactggagggcctggcgctgctagtgctgctgctgtcttgtatggctcgggagaagtgacggtccaggggcaagatctgcgccggcgcgaaagtccgcccggccagggagagacggctcagcccctcgaacctcgaccccgaccatcttgccctgtctactcctcaatcaaccctctccagcatgtcgttcaccgcaccgaccctcggtcagggccgcgagacgatccgcttccgcggcgctggctcaaagtcggcgcccaagctcgacaaggacggcaacgtcttcaagcccaagcgttggatcgaccggcacaccggtctgctcgtcgaccaggtcaggcggtacgtcctgctctatcgcttcctttacctacgagcggcctacccttggaagcggcttcccagctgggccttttggccggacgaacggctgctgatgtcctgtgaccttgccttcgcccgcccgggtcgctcaggtccgcccagccaccctggacgccatcgctctcgctcgccttccgcatgttcatctttgtgcggttcacggctgccatctacactggcatcaccgactgcgacgagggtgagtcgctttgtggcggtccctctcgcaagagggccggttccccttcataaacgagctgactggctctccccagccttcaacttctgggagcccctgcactatctcgcccacaaccacggcttccagacgtgggagctcagcccgacttttgccatccgtagctgggcctacgtcgccgccttcctgcctgcggccgagacggtcccgtacctgatgtctctcggcaaggttggtcatctttctctcgctcttccccgcgctttcctcgctcgtttggcgcgcagcaacccctcctgccgtgcctatgaagccgagctgacacaacccttttgcgcctgtccggttatttccagaggcagcagttcttctgcgtccggatcctcttcgcggtcgtcggctcttacgttgaatcgcgattttatcgggccatcgtcgagcacgtcaacgaccgggccgggcgctacttcctctttgcgaccctcgttgctgccggcatgtggaatgccggcacggccttcctcgcctcgacgacggctatgcacgcaacgatgctcgcctattcgttctacctcgagccgacctcggccgggtcgaaacggcgcgtctacctcgccgccttcttcttcgccgccggcgcgctctttgcctggccgtttgccctcctcctctcggtcccgttcgtgctcgaggaactctttgttggcgggaaggacatcgtttcccccagcgaggtcggatcatggcgcatgaagcgtgtcgctcgcttcgcaagcgctgcactcgttgccggcctggtcgctgtgcgttatccactgatacgcagacttcccgacggcccctttgctgaccacttctggactcgacaatctgccaggttccgattgtggccgtcgactcgctcgcgtacggccgactgaccttccctgcgctcaacattgtcctctacaaccttttttcgtcggccgggccggcgctctatgggaccgagccgacctcattctaccttgtcaacctcgtcctgaactacaatattcttctgccgctcgccctgctatcgctcccggcgcttgccatcacgtacaagtacgacttcaagcggctcggatcgaagcagcgcctgccggtcgagggcgagacgagcccttacacgctcgtcgccctccgcctgagcggcttctacctctggctcggcgtcctcagcgcccaggcccacaaagaggagcgcttcatgtacccggcttacccgctgctcgccttcaacgcggtcgtcacgctcttcctcgtccggggctgggtcgagcgcctctacatcaagtcgaccggaagcccctacaaggtgcgtcttgcctcttgacagcgaaggtatgaggctcctgtcgctgatatctcggcctggtcgcgcacagggctcggtgacgcacctgatgggcaactttacgctgctcgtcgtcctggcgagcatgctactctcgttcctccgcatcatggcgatccagacgtactacgtcgccccgctccacgtcgcctaccatttcgagacgtttgagctgccggccatcctgacgggcatgggctaccagccgatccagcacaatggcaccaacgactgggacgagtgggacctctcgccgatcaagacgctcaacggcgggaccggcctccggctctgctacggcaaggagtggcaccgctttacgagttcgttcctcgtccccgagggcgtcgaggtccgcttcatcaagagcgactttgacggcgcgctgccggccaaattcaggccgagcgagcccgacgctagcggctggtggcgccgggccgggaccaagtgggaaacgctcacgctcaacgaccagaacgaggagtcagccgagcactatgttagtcgtcggggccttagaagtcgtacgtagctgcgccctcgctgacgccttttgttctctgtcgcccgcccctcctcaggtcgacccctcaacctgccactacctaatcgactcgtacttcccgcttcgtgctaaggccgccggcgtcgcgacgtttgagcccgaccacgtgctcgacagcgagacctgggacaagctctactgctcgccgatcgtcgacgccgcccactcgaagcggctccggcgggcgttctggctcccgggcaagtggtggggcgccaacgacggcctcaattggggcgattactgcctgctcggctcgcgaaagctcgtcaacgagcggggtccacagtaaagaagggcgcaggatgcgaggaaacggaactggttatagcaatgcaagaacgaatagacgcgcgtgcgagaaaagagatacaagagtctgcgagggaagattttgcgaagaaattgagattgtgaggagggagggagacgactagaggagggtgtccatcgcggtgccttgcgcgagcagctcttgccactcgcgccgccagccggtgatcctgctccgaagtcctttgagcgcgagcgtcgactggatccagcgcatgaaggcgtcgtcatcgccggggacaaaaaatgacgagaggagcgagaggattgtctcaaagttggcatcagcagcggccagattctctgcgagcggccaaagcgaggccgcaaagacgtcagtcgagggtcccctttgtgagagtggccgtcttacgaacgcacctcggaaggaccaaacgatggcgagcgagacgatgatcatgaggtcgggtccttcgagcaggaaggcatcccagactcggagctgcgtctggaagggcagcgtcgttgaaaagagggtgatgtaccacttggtcgcaaacgacgaggtcgacaccatctctcgtttctgccgagagggtccttgaggaggtcagctcgaacaggataggaggcggacgagctagcgacccaccagcgtggcgtagacctcgggcatcatgctctcgatgagccgctcctggacataaaaggcctcgagcatgcccggaaagccgggcgagaagatctcgtgcatgccgtagtggtcgtggagccggacgaggagggcataggttttctgggcggccgggaggagactctggtcaaggagactgttggagggaaggccgagtcgaagtgacgcacctcggccgagaagtagcatagcaggttggccgctatcgagcccatcccctggcagtactggcaggcgtcgcacttgagcgaaaagacgtgcagcgagtggaacagggcgcgttgcctggcagaatcaagggctcgcaatcagcctcaagctcgggtcttagccgactaaagcgcgcggtccgacacacccaaggccgtagcgggtgtgaaacaagacatggccgctgacagtccgcggcacgtcgaggtcgatctgaacgtcgaacgaggacggtcggtcgatccgctccgagtactcggccaggagctcgtcggccgacgacgcgcgttgcttacccttgcggctgcagtcagccgcggcaaagctgtcggcgagcgtctcccaggccgaggctcgccaccggtcggggatgcccttgtagaccctcggcgaaacctgcgaagggtgtttgagcgcattagcagcggccactagagtgctcaagcaggcaaggccggactgcacaccttctccttcctccccggtgcccaggcccacgagacgacgttcccgccggcgtccttcttctggcggacgagcatgcggtcccactttgcaatccgggcgacttcctttgccttgctcgtctccgactgacgtggactcgtggcggtcgacggtgctggtgaggctgatcgcgaggacgacgggagcgacgaacggcgggacgaaggaggcgcgagcgatgctggaaccgcaaggttcgaggccgggatcgcgaagatgcgcgactcggagcgttgcgaaagggcgctcggaaagaagccgtacctgcaaggtcagagtgagcaagttcagcgcgggttggacgggggagcggctcaacccaacactcaccggtcgaggttggagcgcatgtccttctccttgtcatcgagcccgtcagccgaagacgaagtcgagaacagcatgctccgccggccgagctttgagcgctcgcgcgtccgttcgacgccgtcctcccagccgtcgccggtgacgccagtgacctcgagccgggcgtacgtcgaccgaacgaggaacgagtcctcctcctcgccctcggcctggagcgagccagtcgaagcgacgcttgtcgcctgactgacgctcagctgattgatccgctcgacctggagcgttcctggccggtggcccgacggctgctgcggcgggagggaagctccccggacgggggtggccgcacacgaatccggcggcatgctgctccgcgagctcgacgagccgtgcgacgtcccgacgtccgagtaagtcgctgccgagctcgatcggttcgagtccgtcggaggatgaagcgtcaggtcgcctacgacgacgtctggcaggtcggcgcaggccgccgccgtctgcggcagccggacgtcagcggcgagcggaggcgggtaggccgccgttggtgtcaggtctggatcgagtcccgacgactcgtccgacgtgtagaggtcaaagatagagccggcggcgtcctccgactggatactgctgatcggccgttggtcaacgacgggccggcagccgctgaaggcggcgagagggggtgcgaggaagacgtctcggtcgccggcgtcggagctcgccagcggcggcttccgcgtcagagaggcgaccgacatcgggtcgggaagcaggcgctcgggcgaacggaactccctcggagcttcagatgagcctacagagaaaggtctggtcagatctcctgcggtccccaggagggaaggaagacaacgtcgagcgcacctgcggcggcggggcgcgcgcgtgccaagagttgtccagctacaatgcccaggtctcgtctggtaagatcgatcgggtcggcgagagggtcctgggggcaaggggtaagctctgcctgtatgaggagctctcccgacgattcgtctagacttggcgagggaaggacaggaggaggagctggttggcgggttgacgggacgacgccgacgcgccggcgagctcgagcatctcgtcgacgccctctagacagtcagtcacctttgatccgacctcgttgcacgctttcccttgctctcgctttcgacctgccccggctcccgtgtctagacatggcccccgtattacgcacccgcggtcggcactttatcgatccagagggtcgtacgctctggctccggggcgcaaacgtcggggcggcgtcgaaggtgccatcgtgcgtccttcctccccgataacttgagggccgccggcccagggctgaccgctttctacaccggctggtctgggcaggccagagacggccaagcttccgctcgacaggcatcgggaggtcagctacgtcgaccggcccttcccgctcgaggaggccgacgaccacctctctagactgcgcttctggggcttcaactttcgtgcgtcgtccagtgcgacggcctgggcccgaccagagtcacactgaccagccttctctccctgcagtccggatcaccgtcacctgggaggctctggagcacgccggccagtgagtcaagctcagctacagtctctggcgcctcagctgcagactgacgtgcggaccctccctcgtctctgtcgactaaagtcgccagtatgatcaggcgtacctcgactaccttcgtgcactcctcaaactcctgccagcttacggcatgcgctgctttgtcgccatgcaccaggacgtctggtcgcgcctgtctggtggttcgggcgcgcccggctggacgcttgaggcggtcggcttcgacctcagtgacgatggccagctgctcgagacgactgagggcgcctatcttggcggagtgcggggcggagaatctgagcgaagcgaggaccgcggacgctggccgaccggctaccagaaactcgtcgcagcgaccatgaagtgagtgagcgcccgccacgctggtgcacagcaaggccaggaaggctcaacacacatgctccctctgtggcacctttcgttccgacagcacctgcttctgggcgggagactctcttgcgcccaagctccgcgtcgagcgtcccgtacgcgatgggtccgggacagagacggtcggcatccaggcctacctgcaggaggccttcctcgatgcgatcgacgtgctcgtcgctgccgtcggcggtctcgagggcgtcatgggcttcgaagtccgtctgattcgtggccaaactgcgctgtttctccggggtgggctgaccacctgtttcatttctttccttctgcccggcagctcatgaacgaaccccacccgggctacatcggcctcccttcgcttcacgccttcaactacaacaccgatctccacctccatcttgcgccgtcggctgtccagtcgtttgccctcggtgctggtcaccctcagcagatcccgttttacaagcgctcgtggccggtcccgacgcgcaaggctggcacacgcctcatcaatgccgagggcaagcgggcctggcaggccggcgttcagtgcatttgggagcgcatgggcgtctggggctgggacgcagaccgcaaggggcccgtcgtcctgcgggagacctacttcagcgtcaaggaggacggcagcaaggttggtgtgcgacgcgacccctctgccgcgagtcgtagtcagctgacaacgacgacgacccctcatgtcctgccaggttgacttttacagcgacttctactttcccttcgtcagtctatacccaacccttttctgcttgatatctactgatccagtcggggtcgttcgtcttgaaggtcgagaactggacggcgcgcatgcgcaaggcccttgggtcggtcgacgagagcggcaaatacctgtttgttgagaacatcccaaacgagtggtgcccgcgctggcccgaggccgagcgtcgggacgagggcctcctgctcacgccgcattggttcgtccacgttgtgacgcagctgtctgcttgctatcccagagctgaaatcataacgaccgactctccaccaggtacgacctcaacgcgctcttcaacaagacgttcggcttcatgtcggtcaacgtccagggcctctcgcgtgtgcgtgctgtttcccagcgggttgcatcacggccgacgaactgaatactccgtccttcgcctgccactcgcagggcaagttcctcccgctctgcctctattttggccgccgggcgtccatcgccaactacactctccagctgcgcaatatgattgagagcggctacaagaactttggcaaccggccacaggtgctcggcgagctgggcgtgccgatggacctcaagtgggtcttgcgtagacctctgagacgcgcaagcgggctgactctggctctccattgcgtcggccagcaacaagcttgccttcgagacgaacgacttccactggcaggagcgcatgatggacgccctgctctcgggcctcgaggccaacctcgtccacttcaccctctggaactacaacccggctaactcggaccgcgacggcgacgcctggaacggcgagaacttctcgtggttctcgtccgagcgcgcgactgccgagcgggcggccgaggacctcaagtcgggcgacggcgagggcggctggtgggacgccggcggcaggctgctcaaggtcatcacggtgcgtgtcacggttgacggctgtggtcagggttgccctgctgaccccccctttcctcttgcagcgcccctatccggtcgctctcgctggcacgccggtctcttcgaccttcgactcgaccatctcggcctataatctcgtctttgacctgccctcgaccgacgagcttcccactaccgagctcgcaacaacccggacagagatcttcttcccgagccggacctacggcgtccggcactcgccggccgacatcctgatcgactgctctgaaggcaagttcgtctgggtccgcgccgcgcagcgactctatcacacgagtgaggcccggggcgaggtctctcggcgtgtcaagatctcggtccggatccgaggtctgcaggagttcgaggcgatccgcaaccgctggctcgccgccggggctgtgctcgccctcacgatcgccctcgtcatgagccccgagctccgcgacatcatgctgcgtctctacgacgttgcgttcacgctcatgtcggcggccatgtgactcggcttcgatgcgcccttctctcggcggtcaaggcagagggcatctctcatagccctcgtctatagaggctgtgaggggagagggatagagtcagcgagggaaccctttcttgccgagcttgagggcgactgactgaagcatgactgcgcggtagaagcgctctatgtcaaacttctcggcctcgccctccttgcgcacgcgctgggccttgtcgaccggctggccctcctccttcttgtcggcgccaaagcccgggaagatgcgaccgaggacagacagcgcggccgaggcctgcgactcgaggaacgccttctgccgttgcgagtcggcgacctcgcgtgccgtcgtcgcctgggcctgtgcctccttggctgaccttggcaccggcgagcttggccgagggtcgagcatctcgggcagcggcaggagcacctttgacgattcgatcagacccgagacgtgcttgttgatgtctggcagcgtccagcctttgtcggtcgtcggcggcgagtggagctccgaggttgactggccaaagggcgtcggcgagggtcccttgccgtgctcaccctgtattggcgagagcgaggcggtcgggatatggtagacggacgaaaaggcgggcggggcaaaggaagtagtaagaacgactggaaacttcaggatgagacgttcgagaaagctatttcttgcccgaagttcccagtggttgcagtcgtcgacgatgccgaggactgaaatatatcatgggctagggcgtcagcggtagcgactgagacccagcctggaggagacccacattcgccccacttagcgctcgagaccgagaccatgccgtcgctcccttcgtacttgctgccagcaaagccgtccttctcggcctcgcccgcggcggccgtgtggtcgaggatgagcttcgtccaccaaagcggatgcagcgggttgatcgagacggcccgggcggcgatcgaaaagtagcggacgtcagggtcgtccggcgtcgacgggttaaaaatgttgttgcagtagtcggtcgtcaggttaaagtaggctggcgagtcaaacgtccgcaggagcgagtcgcggatcttcgagagcgactggacggggttcgtgatgacggttgtaaagaagttcgactcgatcttggcgccctccttggccggcggcggcggctcggccagcgcgagcagaggcgtcttgagcgagtaagccggcacgagtttcggcgtcggattggcaatgacagcctttggaacctgaccgataggcgtgcccaggccaatcgtcgcctgcgacaaatgggccggcaggggccgtcaaaatcaatgcactgctcacttgaacacccaagaacgaggcggactgactgagcaccagtccatgaacgggctaccgcggtgaggcgtggcgatgcacgtcagactgcgaaccttgtaagaccgttccttgatgtgcgtgatgaggtagcggcagtcgaggccaccctgaggtcaagtagtagcacaggacgtagccgtcagtagagatgactcaggagactctcgaggcggcgggtgaccgaccatcgagtgcgcaagaaagttgatctgcgccgagagcaaaaggtcagtgacgcgtccggaacagaccttccgatgccagcgaccaacctcagtgtgaggacagtgcttctccagcgtctggtgtaagatctttgcgcgctcctcgatcgatccggttctaaagtcagtcaggcacacgagcgtcagccatgaccttggccgagctcgagtgagtcgcgcaacgtacgacggcacctcgacgacaagcaggtcgacaccgcactctgcaaggacgtcctggacgttggcccagtagtggatctggccgcgaacgccgtagccataaaggccgtggcagaggacgaccttgagccgcggcggacgaaagtcgggcgggtagaggtccggcgagcgcatgagctccttgatgaccgaagtcggaccgccctctgccgtcgtcgaggcatgctcgttcggcggcggtttcgagcaggaagccgaaggatgcgactcggacgcgtcgacagggaacgtcgaccgaccgtcagcgctggctcgtgtcgtcgtcgtcgacgttgctggcggtcgctcatccgacttagcccgacgcgcttccacagcggccgagctcgtcgcccggcgcgagctcctggcgaatgttgtgctgaaggtccgacgcggcagccggcccagcgttctgccgcctgctgtctcattcgccgacgcccgctgctgctcccttgcggcttgccggaggaggttctgggctcttgtctggatgagcgatggtgcgcgcgaggcggccgacgccgacgggccgaagagcgccctgtacagctgggggacgagccccggaggcggctgcgatgcgccggacatccaacaggccggccgctcgagtgcgatgagggtagatgcggatgtgaagcgcctaagggaggcgagagggtgcaggtttaaggagaaagggttcgttcagcccacaaggtcggatgcagaacgaacgccgtcaccgcccccttttgcatttctcacgcacggtcgcctggtcgcgaagcgaacggagcctgctgttgctcgtctgaaagctcagggaccggcctcctgggcgacgcgcgtgctgaggccggctctacacggccctttctccaggacctggcgagcagttcagccagcgagtaagagaagcgacaatataagggtcgggctgtttgctccccgcctcactccagcttagcaggatcttcatgagtcgtggccgttgctgctggggcccaaagtagcgggacgactcagacaaccggatcggggacggccgtatgcggctcgcgtagtgagttgtagtgcgccccgaggccgtacatctgctggtggaaggtgatgcgcgccgcgcggagagccttgctctcggccgccgacgtcgcgccattctgctcaggtatcggcgagtgcgagacgatgaaaggcggcgcggcctggacgacgtggattggcacgtcaaagtgcttgctgagagcttggatctggtccatcgaggcaggggagcgcaggagcgtcagaggtcgacgcccggaagcgatgcagggcagagcgaggagcaacgtacctcgggctcgcctccccactcggccgagttgcggacattggcgacgtattggacaaactcgtcgtcggtcatcatgccgtcatttgtcgcgcctgccgcatcttcgccgccagggctcgcgaggaacggcaggaagtcgtccttgtgcgcctcaatgtagctcgccgcagcgtttcttgtcgtctcgtgcttgttctggtgggagtcgaggtgcagatgcatcgcatctcgtcagtgaggggccgttgggcgcagctgtcgacaataggtcggagggacagaccttgccatccgggatgaggccgaggatcgtcagctggtcggcgatggccgagtagaggcagtgaccgtcgggttggatctagagtggtgggagccagtcagcccgtcgtccattcgcaaggagcagcaccgcaggtgcgcaagcgcaggtgcacctcgaactcgacgaggccgagggccgtccgggtcttgtcgagcgaggccttctcggccgccttggcccggatgatggttcgctcgtgcgcctcgtccgctggcggcagcgactccagcagggcctgctgtttccgggcctgcgaggacgacagatgtcaccgtcagcctacaggaggagggtcgagcccagtcgcagctgagacccgagcggccgaccgacctcgcgctccttgaagcggtccttgctgctctttttgcggccaccagcaccgtcggcggagccaccggtcgactctggcgcggcatctttcgcggccttgagccgctcaagctcggccgcctcctgacgccggtactcggcgaggttctcctcttcctgctcgcgctcggcctcggcctgggccgccgcctcctcgggcgagggcagcgatttatgcggcgacagcaactcgatcgccttgttcttcagtgctgtccgtttgcccatcttaagggatgtctagggaagtggcggggttggtggagggaggggcgatgggagacgacggtcgtggtcggaggatggtggcggatgagccaccttcagcgccctttgggtcggcgcagcgtccgcttacgatacgtcacgcaaggcgccactggcagagcgctctcgaagacggctggcagaaaaagcatgctcaggacgctaaaaggacgcaggtccatgtaagatttgtgagaaagggggacatgggcgcctgagcacgggggcagacgggggtcggcccgcggcggtgagggacgcctgcaccgcgacgactgcgatggcaaggtcggccgagagaggaggccggagcagacggggcgttgcagaggggcgttgcagaggggcactgcagtcaaagaaagtattgcccgccgtcgacgatggtgcgccttctgactctagggtccgttcctcggccgagggccgaagtgtgcgacgaccgactgacgggcgaacattccgccgcagcgctcagtccgagtcgctgtccagcgtgtactgcaagacaagagcgacagaaaggtcagctctggcagggcgaggttggcagagcgcggccacgcacgacagtaggtttcgacttggccgcccgagacgtcgtcgcccgtggcgggggagcgaagctgaaaggacaagggacaaagaaggcatcagctcgcggcacttcactttgatcctatcagaggtccgacgtacgaaagctgagattgccgggcgctcgacgcgggcgtcttggctcgggccgccggcgtcgccttctttgccggcgccttagccttgctgtcggcacgtggcgaagagaaagaggggtacagtcagtcacgtgctgaaaccgggaaggtcagacgagaaatgaacttcgctgtaggagccatcttgcctcctcgccggggcggctcttcgtcgtcgtcaaattcggcgagcatgctccgcgcgttgtcgtccatcacgacgtcgccatcactctcctcctcgtcgtcgaactgcgatagcgagcagatacgtcaaccgtctgcgatcgtcaacagccggaccatgccacgcaccagcttgtccttggctgcggccttgcccttgcccttgattgcggttgctttagtcgccggcgcggccttcttgcccgaagccttagacttgccgcgggcactcggagcagaagaggcatccgagtcgtccaggtcgtcgtcggcggcggcggcccgacccttggcctataacagaggtcgaggaggtcagagactgcctaggaagcaggcgacacgaggcactcactgccgccttggccggccgcgagggacctgcgccgctttgctgctgcgaggcaatctcgacagctgccagagacttttgccgctcgagctgcagggagtcggaagagattgagacttcagcacggctcggccggtctcgaagtgcgccagggcccgcacctcggcctcgatgccgtcttcgtcggtgttgccacggtcggcgctcctgtgatacgtctggagcgtcgtgttgacgaagctgcggtcgaggcgagacgagactcaagagtcagcctctgccacatagccagagttcaggccccgccgacgcactctttgatggctgacttggtccccttaacaaagtgctcgaccgcgagctccatgccctgctcgggcaaaaccttgagctcctgcgcagagaggtacttgttgacgaggtcggccatcgtcaccttgggcttgcccgagccctcgtcatcctcgtcgccgccctcgagcaggtcgggctggtcgaccatcaccttgtcgcgccgctgagcagccttcttcctctgatagaaggcgagaatgtcgcccgggttagcgacgagcgtgttgaccgactcgccaaagcgggcccggttgatgagcgccatgccggtcgtctcgacctgtcacgaccgtcggagtacagagcaattgtcagtcgcaaagatcgtagttagcagacctcgcaagcccaccttgaggcggacgagcggccgcggcttcttgactggcgcgtcgacgtcttgcgagcccgagttttccggatcattcttggcgtcccatgcggcgagtgcctcggcgacgcactccttgacctgaagagcaggtcggtcagcccggtgtcgagccgctgtcacaagatttgtctgctcggtcgcaccttttgccgcagaaattcggtcaccttcgccttgttctcaagatcgagcccgtgttcctcggcttcgtcctccatgacgaggtgcttcatcacaaacggccggactgtccggagcgggattggcgagaggataaactctctgccgcggacaagcagaagaccgaccttcctgttggggagagccagtcgcgcgtcagcaccggcgcgacagtaatgcatgagcgaagagaaggccctacttttcgagcgcctcgccctctgagaggctcgttgcgacgctgctgccgggctgcgagatccagtagagccggtcgccgaccggctcgggcacaattcggcagtcgtgctcgtgaccccagatgacgaggtcggtctgatcgtcaaacatgttttcggggacaaactcgttgcggttgtgggcgaccctgataagtgcttaacaggcgtcaggcgaatgcgggcacggtcagagcgcaaggacagagggcccgcaccggttctgatggacgaggacaatgttgaaccactcaacgccgtcctgcggcatcggcttgcgcatcgtcacgcggccggcgcggagctcggcattcatccggacgtccttgacgttgcccatgccatagagggcgagcgacgtcgtccccttacggaggaggacgggctcgaccgtcaggccgatcggcgcgccatcctcgtcgtactttgtgtgcttgggcaggtctgtcttgccaaagtagttgacaagtccggccgtcgagaggaggtcgagcgagctgagcgcgcccgactgagagaaggggggcgtgatcagcaaggggagcctcgtcgcgagcagcgaccccagggcgcaccgcgtacgttcccgtcggatcgtcgtggttgccgtggatcgagaagatgggtaggctgacgttaatgttgtagtcctcgtagttgaccgtcgggaagctagcgagcgagagggcaagtgagagacgtcaacgattccgggcagacactgctgaaggcgcagcaggaccgtgcgcgcactcccagtcgccgaccttgccctcgtccgggtcgctgaggagctcgatcttgaccggccgctcgccctgcgtgaattcgcgcaggagtgccatcgtctggcggagcgtgtatttggacggataattctcgtggaagagatcgccggcgagcaggaggaagtcgacctggttcgcccggtttgccaagatccccgtgcgttgctcccttgatcagcgaggcggtttacacgaacagcagctcagcgtcagcgtcaaaggacgctacgacgcacctccttgtcccgggcgagctcgaggacctcgcggaaggcgacgaatgagtcttggccgcgcacggggtcgtcctcgttgtagccgaggtgcgagtcggtcgccaccaggatgcggaacgtgctggcaggcagcattcaaggtcagcggggagcatcgccggtcgaacaagtagagaggacagggcgctcacttctccgagcctacaatagttgtgaaagaggaaggcgagccgaaggtcagcgaggtcgctcgacgggcggtccgggtcgagctcgcaagccgcacctcgatcctcgtcctgtgtgagcgccggcttcttgtcctcgacctcgtcgtcggcgatcccaatggcaccgacggaagctggcagctgagcctcggcatcgctcatcatctcggcctctccgtcgctctcgcggacgctgtcgtcgagagatcaaggggagagaagggggaggagtgagctcgttggcgtcaggcaccccccaggggaccgagctgccaaatgacgcacggtgaagcttggccctcgctcgcttgagactggcgcgtagaggcaggcatggctgcagcagtcggtctcgaggaggtaggcggcaaagatgcgaggcagagatcgaggtgaacgagtcgttgcgaggcggctagagcgtcgggcggcgttcctctggtgcgcaggcagcccaaatgcgtacgacttgccagggccgcgactccacttcctttgcatcgcatcggggaagatcaaaggcaggggggtcgtcaaggtcatcagagagaaaagaaatcgttcggtctatagcgagtctatcgaggaggtcccgctgctgcgccgactcctcggccggccgcgctcgaggtcggtctcgccatccgcttctggccgttcgctctcgtcgctctccttggcaccctcgacacccatgaagccgaacgaggcgagcacaaggccggcgccgaggagcgactggacgccgccggtcgaggtcccccggacgaggtcgagcgagattgcaaaggggatcgtcaaggaaagcccgattgtgacgactgcgagagggaggaagcaagggtcactaattggctcgcatagcgactgggtaggaggcaggacgcacccagcggcgtcgtcttgagcatcgccttgacgtagaggtagtcgctgatgagcgtgatgaacatgttgccaacgaggacggcccagacggcacctccgcgcggccagctgaacgtctcccagccaaggaggtgcagcccaacgccgatcggccagagggcaacgatgttgaagaggccgacaaagccgaaaaagagctgcatgtcgatccggcgctcgtcgccgatccgaaccttgaggagaatcaagtagatcgagtagaagagggccgagaggagcgagagaaggtcgcccgtgagccggtaagggtgcgggatgtcgacgtcgagcgcggtcgcgagggccgtcgtcggagagaacgagtcggcagacgagacgaggaggacgccgagaaagctggaaggcaaggaaggaagaccaatgacgaggcgtgagcacagagagcgaccggatcctggcgacggggggcgaagacgcacgagatcgagacggcgagcagcttggccggggtaaaggtctcgacatggaagacgcgaccgatggcgagcgtaaagaagccgctcatagaagcgaggattgttctgtgaagaagaggggtgcgggtcaattcaagaagccctgcgcaaggccctggcgtgggctacaacgcagacgcacgaggatccgacgctagtccactcgagcgccttgttgaggctccagttggcggcaaaccaggcgccgcaaaagaggagggcgagccgggccgtctcctttgtcgtcagccggtctgtcgcccggttgtcggtgaaggcggccgaagtgagcggcgggtggagcgttgcgagcggcgagcgcgagcgcgacgaccgcagccgggcgtacgtcggcgagagcgacggcgtcggagccggcgtcttgtggtgcattcgccggtagaacggcggcagcaggtatagcgcgaacgaggccgtgttcaggtaggtcacaaggaacggcttgttgtagccgtcggctggaggaagggggctcggggtcagacgatggggttccaggccggctcaagagtgagggtcggctctccgcaccaaagaggtcctggagaagggcaacggcaagcgagcgacatgccgtcagcaacagccgcagcagagagcagccaacgtctgcagacgcacgctcgtgatgaagctgctcgtcgtccagagcgagacgaccaggagcagcatgacgaccccgacgacatactcgctcagccctgcccagtgctcgccaatcgcccagatcaggccgccgagcgacgtcctcggcctcgaagcccgatgcgcgctccggccggcgtccttgtccggcgagtgcgacggcgagagcagcagcggcgtcgtcgcgtccggcgtcggcggcggcgagcgaggcgacatgtgtgggccgcctgcggagggagcttgctgagcgaaagcgaggagagcggaggaggcgggagtgcgggcgatgccgaaggcaggagcaagagtagcaggcgagagggaaaggagcagcagcggcagtcggtcggtggttgtggaggctagcgaggctggtctggtccggggcaagggcgagagggagagagcgagggtggcttcgcgctgactttgcagaggccccgcgttgccgccgttgcgtgctctcgcgaggcgaagtgtcgggcacttcgggcgcctgcctgctgattctccatccgtgcgatggcgacagctcgcatgcctcgagacggatcgcatctccctcacgctcgaaggaaaggaggccggccctccttgcctgatcgcagaaacggcctgctgggtcgtgtgccgcctcgctttctggccgcttgctccgcacgagaccgacgacggaatttcgggtgctctgggttctcgtcggaggcagtctgggggtttgccccggccaagccagccggcatgacgacgacctcgacctccttcgaacccctcatctcctcacctccttctctctcatcccgcctcacgatgccgtcctcgtacgacgacgacctgccggccacgcgcgaggagctccgggcgaccttccggctcgtccgcctccagatcatctcgccgctttcgctcctcgtctcggccggggccaacgtcgtgtgtgcctccctgctcaagcccaacagctgtcagtcctcccctttttgaccgcttctccttctctctatccggccaggcacgaattcgctaccagaatgttgaactcgaaccgcccgtcgactgccccggatgcccgccagccgagatctcgcgcgcccacccgacactgcttacgccgctcacctcgatgatcgtttcgtactgggtacgtcccgggccgacctcctgcctgtttatgcgagaattgacccacttcttggctactgctcggctgctagctcgtcgtctacgcgctccaggtcggcttctgcctcctgctcgtcctcgcccggagcgagcagatgaaggacacgctcatccgcggcgttggcatgcgcttcgccatcgcgaactggctccaggccgcctgggccatcttctggacatttggctcgcgctggtcgttcctcgcggctgagatctgtgtcctcctgaacgtcatcaacctgtgcgcccccttgcgacgacaccgcccttctggctactgctgctcggaacgtgcgcgccctgacaccgcctccttcgaacgcagcgcgaccgtcatcatcacgcttcacatgcacaaggcgccgcactcgtggctcgcctacatctttgtccacacgccgatgcggctcttcctcgcgatgctcttcctaatcgactggctcgacaacggcttcatgtgcgcgctctctcttgtcgctggcctgcgcgcgcactgacggactcgcctccccttgcagcgtcctcggctgggagaaccgcgacccggcgacatacgcccgctactcgtggcaggcggtcggcatcgtcgccggctgccacctcgtcggcctcatctgggtcttcctgacgcgcgacgcgggtgcgcatcaccctctctgctacttgagccctgccgcttggccctaaccctccttcttctccactttcgccagtctggacgatcgccgcaccctacctcttgatcgccctctttctcaagccgctcaagacgacggcgctcgaggcgctctttatcgccttcgtcgtcctctacccgctcgtctggctcctctcgtttgccctcaatcgcgtccggagccgcgaaggccgcatcaggctcgaggaggaggcggtgcttgcgacggaggatgcacacgccgaccgcgagcgcgagagccagcgccagcaagcgcggattgagtcgcggccgccggtcgacggcgccgaggccgcctgatcggcactcgcaacgcaacgctgggtcgccgtgccctatgcattccaacctagctcggcaagagtcagattctcgtctcccctcactcgcactctttcgccaccgcggcccttgatcatatcggaagggggctttgtattcctcatgcgctgttcgctgcctgcagatccatggctcgctcgtatgccatcgctctgggtccaatcgacgttgatccgcgccgtcggtcatctcgccaacgtcttgcgcgaggggtgaagtgaagacaatgcggatgagagcgacgcactcgtccgctgcctgccgctcctcgtgtcttgtctcgcccgccgtcaaggagcgagggcaagtggcgaaagtgaggcatcgcagcatacggtacagggggatgaataaggagcgcaagaggcgtcgtgaggtgtgagagagagagagagcgagaacgctacaatttcgtgcaggagggcaaaaggcagggaggaaggatgggtcgaccggcggttgcgcacgcactcagagcttggcgtcgtcgggcatcgatcgcatcgcctgccggacgccgaggtcgccgagaacatcctcggcaccgccctgtgcgcgcaggttgcaagaaggagtcagtactgtaaaaaaaagggttcaacgagcagaccgagagggggagacgcacaaggatcgcgttgaagggctggttgcggctgaagccctcgatgactacaaatccagaatgagcgtcagtagggcctcctcagacgagcgtccgagcaaccaagagcaggcgactcacacttgcccatcccggtcttggtgagcgatcggccgccgaaaatctgaatggcatcggtcgcaatctcaccttcgcaccgagtgcagtacatcttgaggagtgaaatctggccagcgaggtgcctgctctgctccttgtatgacatcttgttcatctgatgcgtgatcgactgtcgaagggaggaaggtcggccaggttagtaagaagcgcccgctgcacgcacagacctcgcgacgcacctcgagccacgcctggcacgcctcaaccttggcgatcatcgacgcgagcttctgccggatgaccggctgaccgatgagcggcttgccaaagacgcgccgctgcgaggcccagacgaggcactcctcgaccgccatgcgcgaggtccgagctgacgagcagcacatgacccagcgctcgtggttgaagttggagagaatgacgtactggcagaggatggtatggggggctcggtcagtcgacaggtgtttctctcggcggcctgtagcaggaggtaaggcgggcacgcacgatgcccatatcctccttgccgagcgtgttctcgatcgggacgcgaacattgtcaaacgtaatgtaggcggtgccggccgccttcgagtagcgcgttgacatctgtttcgtctcgacgccctcctggcgcgggacgaggatgacggtcaggccgccctcggtccggcagccgaccttgagcaagggagcgaggtagtttgcgttagtcgccgcttaaatcgtacctcggcgggcggacggcaggactgacggtgaagtagctcgcaaaagcgccgccggtgatccacctggaggggggaggagaaggagcgtcaattgagcatgtccggcagcagagaccctcggcaagaaagaacgcacttcttgtggccgttgatgatccagaacttgccgtcctcgctcttcttggcctcgcaccgtaggttgctgacgtccgagccggcaaaggcctcgctgattgcgaggcagatcgacttctccgccttgaagatctcgggcacgaccttctgcttgagcgcgtccgagccaaagttgaggaccggcgggaggccaatgacgttgccgccaccaaggccgtcgccgtagccgcgggcgccgcagaggacgagctcctgcgtgatcgtcagctcgtggaagtctgcgcacaaggaagggaagaagggcgtgagctcgagggcctcaagcgtcgaggacgagctgcgactgacagtcaaactcctcgggcttgacaatgccgtccatcagggtcagacccttgaggtgcggtccgggctagaggaaggaggagggagaggctgacgagtcagctcgctaagccggtcgccgaaagacgcagagttcggacgtactccaaagcgcatggcgtggatgttgagctcggccagccgttcattgaccttctgactcgggtacctgcacagcgagagaatcgtcagctctcctgcaccagttgacgagacgagggcggcgcgcgggtaacgcacttgtcagagtcctcgcaggcctgagcgtccgggtagacgacctcgtcaacgacctcccgcatcgccttctgaagcttgcggtgcgagtcgttgtaataaggcgagtggtaggcctttgtgagccacgtctgcagagcgggaagcagggcatcgtctggtcagcgcccctgcgacgagctccagcggtcggtcggtcgatcgggacggaccggctccgagtagggcacctccttgagcgcgccctttgcgcgcggaaagatgctctggtcctcgcccgcgaggacgccaatcttgagccgggcgtacgccggcttgagcaggatctcggaccggtggaggccgtagaagacgtcggtcgcgtcctggccggcgacgtcctggtcgataagcgcggcgaggccgccagggtggaacttggcaaacttggagagatcgtagacgactgaatcgatgatgatccactgggacgagcaccgagggtcaagggaaggtgtcagccgcgggaggaagcgggagtgggatgcctcgagctacgcaggacgcacgaggtcgccctcctcgttgtgctagcggggcggaaggaatcgtcgcaacagaagacgagagcggagcgagccgagcgaggagcagaccaggtgtggttaagaggcaacgggtcggagggaagagagcgggaagggacgaaggggcgatcagcgcgtgtcagcgggcgagcgtcctgcccaagggctgcgggccgccgcaccttggcgacctcctcctttgagaactctcttggagccggagactgctgctgagcgtcggccatcgtgtgcgtgcgtgtgtgtgggaagactgctggaggtagggagcagcggggtgatggttgagagagcagggagtccaatggccagccggctgaaggatgggccaggtcggcaactggtcggcccggagcgagagaggcaggctagggttcagttgaacctttctcactgcatgaccatgctctggttctttcgttctgcatggccgcgcagctcgccccccgggcggtgacactttctcgcgcgagcccaacctccctcagccctcctcgtccctcactccgcctcggcagacccacctctagacgactgcaaggaccggcacactcgccccttgaacctcagcaccttcctccccccttccgcggcctcaccgcttgcaacaaagggtgcactctttctctaggcaccgcgcctcttcgctccatcgtgctcgcgcgcctcctcttcctcctttccttcctcctcttcggaccatgttctcgcgcaagaaggaccgcgaccgccgctcgtcgctcgcttcaccaccgcctcctcctccgccagctccatcacatggccagcgccagccgtcgcacacgtcgtcgatcgactcggtcaccggccggccgtcgttccaaggcccgcagcggtcgacaacgtcagtcgacctgagcgccgacgctgacggtgccagcagcaagcgaggccggcgcggctccttctttggcttcggcagcggaggcggtggcagctcgtcaaagcatgactcggctgagccgacggccagcagcggcggtatcggcggcctgctcgcccggacgacgtcgcgcttctcgacccacgacaatgaggtcagcgacccgcaagcgtttgaggcaggccggcgtgaggccgctcaacggctcgcaggaggcggcgctcgctcgtcgccgctcgcaaacggttccgctggccagcagcagactgcaccgcctgcgcaagctggtgctcagccgccggcggctccctcagcaggcgccggaggtgggggactcgacgcacagcgctcagcggccgcggccgaaggcctccggcatgcaatccacctgctctcggccgctcagcccgataaggtctaccggacgagcccgccgactgtccggagccttcaaatgtatggcctcgacggcaagcacccaaagatgggggtcccggggtccgagacgaacgactggcgcgagacgtggctcgagctccggggtgtcgtcctccgtgcgtctacctgataatctcccggcttgagctgccgataaaggctgaccggagcacgtgtgtgcttcgccaacagattcgtgggacatgaaggaagtcgcagagtacaacgcccgcggcgaagaccgccacccgaccaggaccaacatcgtgcgctctcgcccgcctggcggtgctccctttggggttcaaagctgacatgcaccttctgctctatcagaccgacgcctacgtcgacatcgtgcctgctcttccgccgaccgacttcgccaagagccagggcgacgaccggccacacccgttcgtcttctcggtcaactcggccggcttgaatgccgtcctcttttcgtgcgagaccgaggcggaccggaacgagtgagacccggaccttgtcctcctcctttgttcgagagcgttgacgacctcatgcgtgtcctttcagatgggtttcggcgattcgcctcgccggctgggaaaactcgcgtcttcaggaggtctacaccggccatctgattcgcgcgacgctcaaggctccacttgggtcacaactgacgccggccgcgccgacgctcgccggctggtttgacgtccggacgtttggctcgcgctcctggacccacctctgggtcgtcctctcaatcgcgagcccctggcaggaggccgaagaacgagtccgggcggcgggtgcggcggcagcggcggctcaggcagaggcagatgcgacgtcggccgtcgctggctcggcaaagtctcgcaagcggctctccaacatgtttggaagctcgaaggaggctacgcccgcgccgacgccgtaccatccacccgtccctggagatggcagcccgacgacagcaggcgttgggcttgctgctcagcagcagctcgacccgacgctctcgaccgtcccggtcgtcaaggcctccttctacctcgtcccaccgggcacagcgtcccccaccggcgctccgtcgtccgctgccggccggcgagcatcgctctcgcagcaaccgccagcaccaacgcaacccgtgcttgtcatctcggacctccatcaggcctacgccgtcttccctgagtcgcccgcggccgtcgatgcttcaggcatgttcaagctcgagggcgcgatgcgcggcgacgctgtcggcgcaagtggccgcaagcgcgaggaaggctggtgtctgctgattcctggcgataagcgaggggacgactgggtcagcggcggcaagcacgagatgattcgctggctgacgggtgcgtcctcctcggaactcggagaggcgaaaacgcctgcctgatgcagctcattgacgactctctcctcctccttagcattccacgacgcctttcagctctacggccgcccgcgccactactcgtgggacccgcgcgaccccggctcgctctttttcggtcacccgggcgggccatccgagccgaacgtcttcctcgcgaaagcgcccgtccggccagacgaaatcagaaccgcccagccgagctttgtccgcggccggctgaccgaggcgctcgccgccaagatgggcgtcaagctcggcgctgctcaccctcgcggcccggcatcgtccgtcatggtcgccagcgcgcgcaacgtctcgccgcagcagcagatgcctctgccggcccagcagcggcaggctcagcagcctcagccacagcggcagcaggagcagcagcggtcgcctccgataaacggcggcgactcccgtaagatggctcgcgggctagagcacctcagccgcatcagccagtcgaccgacggccgatcgtcgccgctgggctcagaaggccatgcctcacgtgccagtggaggcggcttccagctccctccgctgacattcgatggcgagaggccactggcgacagacgcgcgttcgccgccgagtcaggccccggccgcggttgctccgccactggaaccgcttcctgaggttggacccgactcgtcgaccgacaggacgccgcgacttccgtcgtcgtcgctgctcgatgctccggcaacctctcagccgcctaccgcgacgcacacggcccgccagcagtcgatctcgtcgctcaccccgaccgagacgccgagctcggcgggcaatgatccgatcgtcgccggtctgctcgcccggcgggccgacaagacgacggcggcgacgacgcccgagtacacgtacgactacacgcccgacgttcgcacgcccgcgagcgaatggtcccagtcaagcgccgagccggggatggcggcttcccgccaatcgaccggcgggccacccagcctcgccgtccacgagacgctgcgcgaggagccgggggagaggtccccgcaagttccggtccgccacgaggccgagcgtgagccgagcgaggagggcttcgaggactatctcccggctcatctgatcgagcccggcctagcaaccgagagagccccgccgcctgcgcagccacaggtgaacatgcagcgtttcggcagcaccactgaaattagcctaacgcttgccttctccatctctaggtcgcgcaggacgcgctgtcgccgatcgctgcctcgccaccgcaagccgcacggaagaaggagatggcctcgctcggccgccggccgtccggtgcccgagcggcccctccgcgccgagtcgcttctggctcaacctcgtccatgccagccttctcggacgaggaggagcagagccagctgcacgccgccaatggagcgcggacgccctatcagcaggcatccaaagcgccgaccgcctcgtcgcccggcggcgacagccatgcagccgacgccctcgccgcgctgacttttcttgaaacgtcggcctcaccagagaagccgacgatgcgcgacctccccttggcgccaccgcctctgacctcttcgtcgttggaggaccgtcggctgtcgctcccgcggatcacgactgacttcgaaggacctgcaccggctaccgctcccgctggacacgacggccggccgcagcctgcccagttcccgtcgtcctttgggccgggcaaagcggcggccgagcgtcgcgccaagctcgaggcagccgagagggagcgccaagaggctctccacaagcccggccgtggcaaagcgcaggccgccttcaagaagcctgctcgcgcgggcggctggcagagcagcgacgaggacgacgacgacgacgagaacgaggacgatgaggaagaggaggaccgtctcggcaatggcgcactgccatcgcaagcggcgcaggccctccggccgctgcctcagaacccgtcctcgggccagcttagctctcgcgagcagcagcagcccgctcgctcgccctcacattacgacctccagccgcgatccgagctcgtcggccaccacagcagcggccacggctttggcagtggcggcagccaggcccggccagcgtccaactatgtcgtcaacaacggcggtcactcgctcccccattcgatgtcgcgctcgacgatgcaccaggtcgtccaaccccagccacgggcaggtggcgtgccgcactcgcgctcgtcgatgtggaacacgcatctcgagacgccgcacggcggtcaggcagcggtcgagcccgaggacagcggcaagtttgtcacgatcgagccggcggcaactctgacaaaggccttcaacccgaacggcctgcttcaggcaggcctcgccgaccgcgacgagcgctcggccaagcggcaggaggaagtagcgcgggctgacggcagctctctcggtgcgtccctcctttgtcatctcgacgggaggcttcaaaatgctgactgtgacgaccccgcccggcagtcaacgtccctgccccgcctccgccgcctcagatgggcttgctcggcgccatcaccggctacgaggcccaacgctcgcgcgagggcggcgtcggcgcagccctgaccgagcgcgaccgcgagcgccgagaagccgtgcgtcgagctgccgtcccttcccgccgaactccgagctgaccgagcgaccccctgaacgaccttcgcaggacgaacgggcgcgcaaggccgacaacgtccagcgctcgcagatggagcagatgtcgcagcacggctacggtggcggtggcgtcggcggctacccgtacggccagccgcaggctcaggggatgatgcccgggatgatgccctggggcatgggcggctggggaatgccgcctgccttgagtcagtatggcgggtatggagggcagatggatccgcaggcgcagatgatggcccagcaggcggcgcagatggttcgtccttcgcgcctcgagaggaacgaagcaagggcaaaagctgactctctctctctcttccttctcttggacatctgcaggcctaccagcaggccatgatgtcctactcgcagatgggctcgcaaatgggctcgcagatgggctcccagataggcgtcccgggcatgatgccctcgccctcgatgggcggctggcccggccaagcgaccgccatgccctactggggggctggcgttcaacccccgctgagcccgacgccgtacctgcctcaacaaccgtacgccgcgtcccgggcgggctccgtactcagcggcggtggtggtggcggaggcgggcaggagccgcacggcggcagcatcccgcgctacgcctcgccgaacacccatcagcagcaccagccgagcaggtcgccgtcgaccctcgacgtcggaggcgggccggcgcacccgagccggtcgtcaacccctcggtcgagctcgaaggccaacctgaccggcgggcactagcccccgcgtccgtcccctcgctggctcttctcctctttcacttcttccatccgccatcctttccaagacgggcacttcttcgcccttgctcttctgcttttcgcacaaacaccccgtcccagacactctctcctttgctttcctccgctctcccgcccccttcgcacacacgcatgctcgcttgcctcgctcgctcgttctctctcttcccggcttgtattctcttcgacgcgcccgacgcgtccctcgtcggccgctttggccagaacctcgccgtcggcggcaggcgctacaaggatgcgcggtgcgttcctcctattccttgctgccttggtctccctcgtccctctctcgccttcgcgcaccccccttcccttctcttcccttcccttccctttgcccctcccctctcttcttctccaacctgcctccaaagctgaccccctgaccccgccctcagctactgctttgaccgcgtcttcgaccaatcggcgacacaagaggccgtctttgagcagacggccctcccgctcctcccgggcctgctcgacggcttcaacgcgaccgtctttgcgtatggcgtgcgttcctgaggcgcgcgaggaggaggggggacttggacgagagagctgagaaggacgagcgaagggctgaccctactacgttccttctctctcgctgctcgcccctctcgctcgtcttgctcgtccctcccgctcgccctatccccccccgggccgcgccctcgctcgcctttctttcgcgccccaggccaccggctgcggcaaaacgcacacgatcaacggctgctacgacgactcgacctcgccccggacgctcaaagccaaaggcgtcatccacctgacgatggaccacctctttgcgctcattgccgaaaagcaagacacgctcgccgcccagctgtcgttctcctacctcgaaatctacaacgagacgatccgcgacttgctcgtcgacggcgagggcccgcgcaacgggctcgcgctccgcaaggacgagaagaaccggatcaccgtccctggcctgaccgaggtcgagcctcacgacgcgagcgcgatccattccgcggtcgagcaaggcaacaagcggcgccggacggaaatgacgaatgcgaaccagacgagctcgcgctcgcacgccgtcctccagatcaacgtccgcgtccgaccgctcgaggctgggctcgagcaggaagtgagcgtcgcaacgctctcgatcatcgacctcgccgggtcggagcgggcggcagcgacgtcaaacctcggcgcgcggatgaaggaaggctcagcgatcaacaagtcgctcctctcgctcggcaactgcatcaacgccctctgtcaacccaagacgtcaaacagacacatcccttaccgcgactcgaagctgacgcggctcctcgagttttcactcggcggcaactgcaagacgtgcatgattgtctgcatctcgccctcgaccgtccactttgacgacacgcaaaacacgctcaagtatgcgaaccgcgcaaagcagattaagacggccgtctcgcggaatgcctactcggtccagacgcacgtcaagcagtacgtccagaagattgccgagctgtccgagacggtcggcgtcctccagcggaagctcgaggcaaaggcggccgaggacgccggggccgagttgcggaggagggacgagatgcgactcgaggttgagcgcgcgagggacgacgtcggctcaaaggccgcccaaacacggaccgacatgctcgacggcgccgcgtgcgaggcagtcctcttcgcagccgaggcccggctccggccgctccgcgcgagactcgccgaactcgccgacctcaacccgccgctcgcgcctgcgctcgcggccgagcgcgagctcctgacgcgcctcgcccggccggatgaggaccttctctcgtcccccgccctccaactgcgcctccaaaccgccgcgaaatcgaccgccatcttctcgagcgtcgtccgagccgtccaagagcgccggacaggcaagctcgacccgcttgccaaagacaccgtccaggcctttgcgcggctctcgacggccgagcttgatgtcgctcagcgccgagcggccgaggaccggcttcgggcgagcgcacgcgagcaggccgagcgactcgcccagctcgcaggggtcgttgcgcgcgcgctgagccagatgaaggacgctcagggccggctcgatatttacgagacggtgggcggcggcggcggcggcggggcggagcggggcgagccggcgtcgtcggtcaagggcgtctcgcgcgggctaggtgacgccacccgtgaggcagcgaccgagctcgagcggctgctcgcggacgctgcgctcggcagcgccggcgcgagttcgacaaccggccgggcggcaagcccgaccaagacgaagcactacacttcgccgtctgcgaccttcccgttcgtcagcggcgcaaacgcagcccctctgccaccgccctcgctctcctcgactgccctcagctcgttcgccgcggcgcccaaatcacgcgcccggaggtccctcattgccggtagcgcgtcctcctccctcggttcgtcgtcgtcgcccctcaaaaaggcctccgcgatgaaagccaagtctgcgccctcgccgatgcgttcctcctccttggccggcgcagcatcgccctaccgctcgtcctaccgcgcgtcgacgctctctgccggcagcagcagcagcggcggcgggccgtcctcagcggccaagaagatccgctggcgggacgaggcgggcgagggcgcgatcgacgacgcgagtcggatcagcgggacgatcgaagaggaggaaggggaaggggaggatgcagagtgggaggacgagcgggcagacgctgcgccgccgttgccgacctttggccaaccgcctgctcccccttcgacgacggcaggagcgacctcgatgggcctggcgaagagcgcaccgacgccgccgcagccgaacgtcttcaaagtgccgatgctgccaatgacaggtgggcctcgaccgtccaaagcacccggcttctcgaccctgtccgaagcagccaacgagtcgagcccgtcggcgatcaccatcacctcgggcgcgtcctcatcctccttctttgcgccgccatcgtcggcgcccggcctggcgccgccgtcgctcttttcgcgcaagccgctcggcgacgccgccccagggctcaacgtcaactcgaccttttcactctcgtcgcgcctctcgcccgacgcctcctcctctgccttcaacgtctcctccaccaaagccttttcgctctttgccgccggcccccaggcgtcgcctctccgccagccgccggtccggacccagcgcgcagtctcgtcccccgccaaacggcgcgtctcaaacgtcggcccgatgcggaccgagaagaagcgggccgccggaaagtcgtccctcattcccgtcgcttctcctcctggtaacaccggactcggcgagctcctcccgacgttccacgagatgacgccccagacgtctgcgctcggcggcggcgccaggagggtcctgatggccgatgccgccgccggccaagcagcgcccatgaagtcgcccaagaaggcggcgctcgctggctcgtccggcggcgggcgcgcgcctcgggcgtcgctgatgggcccgatcgggaggtcgaggacgtcgcttgcgccggcgccaggaggcggagccatcccgtcgtatgcgctcccgacggcgtccaagacggcggccgtgaccgagaacctccggggtcggacctcgatctcgtccagcggcggcggcagtaccgcctggcgctaaagctttgccctttgctttccctccttttcgcagcaacgttccttttcgctttcgcctgcatctcatcttcttttctcccgcgccgctctctgcctcgacctggccatccctttacctgcatctctcctgcgattccctccccggccgcaattcccttcctgtacgccccgaccccctgcatgccctgcacacgagcaccgagacgagccgcggcgcgcggcagccagagaaagcgcccgtctacttacccggacactaatcggcccgtcgatctacgagagcgcaggcgctggccaagtcgggagccagtttcggccggggcgagccaggcgcgtcaaagggcgtcgcacacagagactcggaggcctccgctcgaccgagagaaacgacgcgcgcccgaccggcaggtgggtagtcagcgagcagaggcatcgcgtcctggccaggccaagactgaggagaggacggaggagatggaggacgtgacgaggtgtggaggcgcgagagaaaggtcgacaatgttgaactttggacggtccagccggcagggtggtcagtctgtgggcgggatggcaggtgcccagcggtcaagcgtcaatctcggtcgtgcagcccgacttgacgaaacgaaacgcaccgtgaggtcgaagaaggccgtgttgccatcggccagctgatgctcgggcgtccgatcgggcttggctgctcgacgacggcctggccggcgccagtccgccgtcaagtcttcgtccccgcgctccttagcgcttgaccgacgcagagatgcgaggctgccgaagaagccaacgcctccaacctggatcgtcaacacgacgatcggcttgactcgaccaagcactctgccctatcggccccctttcctgctctcctgactcttggctcggccgaatgtgatgctcctgctcgcgaacccgcggcgcgtcgtcgacctcgcaaacgctttgcactgcatctgccgtccaggtctggcccagtcgactctctctcggtcgctcgccgggccaagcccaatcgtttgagacggggcagtagtgttgaccggcatctggctgaccctggagggggaagttgaatgtcagtcagttgagcatccgcttcgtcggaaggatggcattaggaatactcgcctatcgacagcgcgaggccgctgaggtggcgtaacgtcacgcccttcgctcacgtacaggctcgagcctccagggcaccgctatgttccagccgccaccgaagccggagagacctactttgaccttcgttaacgccatcgtagagacaagcgactccaaccaggcggccgaatgctgggacggagctggcagccgtgctggcacctagaggcctctcgacgtcgttctgcaagcaggagagtgaacacaccttcggccagtaccattgaaggatcaggatcagtagggcgcaagcttaaaggacacaatcggaagtgaacaggcacggcctgaccgactgccgtcgagagtgactggctgccgtggcccagcttgcttgccgtcgtgaggcgcgctgggcagaggagcgggtagtcaggccggtcaggatgatcagtgcgaacgccctctgtcattcagtttgaagaaaccgagctgagcggcgtcgctcgacggacgtgcctcacagctggtcgtcgtcgggtcgaaccatggtcgaaccggccaaggtcgcccctttccagcccgccctctccccttcccgaccctctcaccgccaaccgcttcagccatggtcgtcttcttcagctcgaccgcggccgacccgccgcccgtcatcttcatgggcaagtcagtcgctccttctccatcttcccttctgacctcgctgtcgacctcgcccgaatgagaaagggcagagggacccgcgctcgtcggtcagggccgaccagctcgtcgacccttcgtctctgataccagccgatccgacgctggacctggctcgagctggtgctagcgagccaccgttcttgagcgatggctagccggttcacgacgatcgaccttcgcgtagagtaggtcaggccaggtcgaaccacagcctccgaagctcgtgccgtcggctcctgtcctgcaggcccacctacgccggccgggcagccggaaagtcgaccgttatcgaccctcactatacgcaagtacgcgggaggagtcaggcttctgcgaccgtctatgtctgatgaacgtggcgagaggtcgagctcgagtgccgagccgaggtcattccgctgacccctcagcccttgctcttctcctcctgtcggacctcgcctcacctgccttactcttcggccgctcgctgtactatgcggctggtcttacggacacccagagacaaggtagagagtcagtccgtttccttcccctcgcgcccgctctcagccttgcgaccaggcgaactccgccgcatccgccgccctctccgcctctcaccctcccccttgcttgagccagcaacagcactgacacccccttcgcaccgcccgcagacgaggatctcatccgctacggcctccactcggacctctggttccacatcgataagctctcgtcggcgcacgtctacctccggctaccgcccgactgcccttggggctcgtgggaggcgggcctgccagaggcggtcgagcaggagatggcacagctcgtcaaggccaactcgattgaaggtgcgtgccgatcagagtctgacttttcgctccgactcgcaacgtctgacccgaactcctggccggcaggcaacaagcggccccaagcaaccgtcatctacacgctgcactcgaatctcaagaagacgggtgcgatggcgaccggctccgtctcgttccacaacgatcggctcgtgaagcgcatctttgtcggcccgcgggataacgccgtcgtcaaccggctgaacaagtcgaaggtcgtccgagaggtgcgtcgtccgtcgacttgcttcgagcttagggccaagccgggaggggcggctcgacagtgcccgaagatgggagctgaagaacaatgcgtgccctctcctcctcccatcacaatcaaactctgctcgcgttgcccctcgcgccgtgtcctatacttctctcgcttcgctcaccttcgcctcggtccgcaggtcgaccacgaagaagagcgcgtcgcccgccagcgcatcgaaggcaagctcaaggcggcaaaggcaaacgagctggtgcgtgtcataatttcttgctcgaatcaaactaagtcctccatcctctcgcgctgaacgtccatcctcccacctctgcgcgagcagaagaacgcccgtctcgcttcggaccgggctcgcgccctcgccaaatcgcagcaaggctacgcctcgctctttaccgaagaggccggatacggtgtggccgagcgaccagggcttggtccgcgcttctcgagcaagcgcgaaaaggccgagggcgggagtgggagcggaaaggcgagcgaagggaggggctcgaaggccgaggagaaggtggcgcgggagctgctcggcgagacgggcggtgaaggcgaaggtagcgacgacgacgacgagggctcgcaggacgacttctggtagacatgatcgagactccaagaggcacaagctgaaagtgggagagggtacacacaagggcaaatctcctgcgcgcagagggtctgtcgcctcacggcaagctgctagctgcccgaggcacaacgacttcagtttcgcttctcagcacgttctcgctgctgcccctcgccagggatcaaggcatccgtcacagcccgaagaggacacctccttcgcccgacgtcgtcgccgtcattgggtctgctgcgcgcgctcctgctccggccctcgcggctccatcggccggccgtccctcggaaggtcgttgccctgcgaacgtccatgctcgctgcccgaccttctcgagccctcgcacacctggcccaccggttttactcgtccaaggctgcctacatgggtgagaagttcgtcctgggcgagcgactggaagagcgtgcgaggcgaggcgaggcgagaggaccggagatggcctcgctgtcattgctcagccctccctccctccctctagcccatgctgaccagtccttaactctcctcgcagccaagtcaacttctattcgggcgcaccggccctcaaccggctctcgttccaccggcaccactcggctctgctcgacgcccacctcggccacgagctgacgctctttgtcgccctttcggagggcgcgccgctcgtctcgtcgacctcgggcgagcttgccctcctcagctggaaggacgtcggcctgctctttggcggcggacccgaaaagggttctcggttcgaggccgacagcgacggcaagacgcggcatctccagggcgctcgtctgccggcaagcggcccaccgctcgtcttcctcgggacggacgagcgctcggcggccgcgaccgagaagacgctgctcgtgcgcgatccggctccggagctcaacacgtctaacccgccggtgtttgcgctcgatgcgtcgggtctcgcgagcgagctgctcgagccgatcctaaaaggcgacggcggccggcagtttgtcgacgggaggaaggcggcgacgcgattcgggccctgggaggccggcgtgttcgcccaggcgaggagcatggtcgattggaacgctaggaacaaggtgcgctcttttctacacctctttctttgtctgccgtttgtgatgtcgtgctggcagtcgaagcgaaggaggacgcaggcagtctcggccctcgctagagcgtaaaagggcccaatgcacggctctcaggctgatcaacgatcgctcctcgtttcattcagttctgcgccggctgcggcgggaagacggtgcgtctctcctcctctgactccgcacattcgctcgtgtcaagcgaaagggatcgcagttgcgtcgttgcgctggactgacagtcttctctgccgggcgggcctccgtctcgcagtactcgctttggggcgggtcagtccttccattcacttccaccgttacttccgccttccctccagctgacattcctcgtcactaaatccttccctacgccaggtggaagctgtcatgctcgactgctcgcgcgccagagggttcgaaatgcccttcgctgaagggcctcaacaactactgctacccgaggtacgtgcctcgctcgcctagtcaaatctgactggatgatctaatctggactcctgtttccccttcctcgctgtctcaggacggatcccgtcatcatcatggttcgtcgacggcccccgcggtaccaccattctgaacagaccctgactgctccactcgcgcgcacccgcaggctatcatttcgaccgactcgtcccagattctcctcggccgccaaaaggcctggccacaaggcatgtactcgtgcctcgcaggcttctgcgagcctggtgagagctttgaggatgcggtccggcgagaggtctacgaggaggcgggcgttgtcgtcgaggaggtcatgtaccactcgagccagccttggccctatcctggtgcgttctgcgcatcgtctgttcttgcgaagcgctgcattggagatgggagcggctgacaccccgtcaaaccggatcctccgacgtcgcagccaacctcatggtcggctgcttcggccgagccgacccctcgcagacgatccggctcgacctcgacaacgagctcgagtcggcccgctggttcacaaaggccgagatccgggcgatcatggccgatccggaggggacggtcggcaaccggcacgaccccaaggagtactttgacgtgcgtcgccctcgatttggccttcctgacttgtcctgtcacagcggctcttcagtcccaagctttcgaaggatggcggatctagcactgactcctcctttcggcccctcttgtgcccgacagcaagacggcaagctcctccccggcccgcctccctcctcatccggccccgagcacttcaagctcccgccaacgaccgcgatcgcaggcgtcctcacgcgcgcctgggcgacagacgacgttgccggctgggcggccgccagcggtgagccgacaaggacggtcgacccgcgcctctgaacgcgacgcgggcgcgacagaggccttgcctaggcggcatctgcggcgcacgttgaaacgatgtccactgttgctagcatcctcttacgctgtcggagatgccagcggaggaagaggcggcgcaattcgttggctcgatcgaagaacgccaggggctcgcagactgaacttcggaactaaaggacatcgcagaacaacagagggcctaagacgaggagcaaaggagatgaaggggaaggacaatagggcgacctgagggacggtcggcaacgggtggcattcggggcgcgcatccgagcggacaaggggtgttatctagtgcggccggattgtttgctgggaaagagacaccggctaattagtaagcgaacgggcggactgcaggacaaggatccgcaggtagagcgcttacgctcgcaggcgagcttgaagtcaagtcaaagcggatcacttcttgcccgccgctgggcgccgggggctgtactggcgcgacttgatgaccttctcgagcgggctgagctcacgtcgcttgcgggctggggtgcagttggcgggagaggtgacggcccttccgcaaccggcaccgccgatgggagccccggtgtcccggttgatttggcggaggatgtcgccgttgtcttggtagaaacacttcttctccccactgcatcgggtcgcaaaaggtgatcagcttatagctccaatctctagcaaatgagcgacggacgcccgacgtactaatcgcatcgcgttaccgggaccctgacgatctcgccgttgatatcgtagggatagggacgttcggcggcacccgcagggctggccccggtaaaggcttgctcggggaagccagggctgaagccgccaatgctgggcgggcacgtgatgaggcactcgttggcagcccgcgaggctgcaaaccgcttgacatactcgacgccggtcgggccctggcggagctcggccgaggcgggcagggcgacggcggcgaggagagcggcgacgagggccgcgacctgggaagaggaagcgaggagcattgtgggggcgtgaataggagaaagtgggctgaggttgagcggcgaggcaggagggaatgaggaggaggagagagagagagagagagagagagagagagagagagagagagagagagagagagagagagagagagagagagagattgagagagagagagagagagatgagggggggaagaagaagagatcagccctgtggtcgccttttgagctccgcgttccaaggccttgtcttggcctgaaaagtcgagctcgaccgagtagcagcaggccgagcaagtaaggctccttccggcaggctgccgaaagcagacgaacgattggtcgacgtgaaagggggacggggcgcgtcgagcgcagcagccctggtgccggtcagtggcgtttcgtgcacaagtcggtgggcggggtcgcctgggcgaggaggatgacgagcgtgaaggagaccggcaggccgtccagagcagccaatgctgggacaggacgtcgacgggcctgttggcctctgtagtgatgcgtgccgtggatcaagctccagggggagaggctgctggactagatgggctgagcgcgaggctgaccggtcgagaggcaggcttaggccgctgagcgaccaacgaaggctgacccaagctgccaaggctggctcagcgcgatcgcggccaacggatggtcagcagccagtttgcttgggtgagcttcgaaagcaaggcatcccgttgctgcaggccgatgtgagacgaaagcggaggccagcacaggcaggcgagcccgtcgacgatggaggggcggagcgaagacccaacctcggtcgtggcagcctcatccaggcatgccctagagatcctcgacggccgccggtgacctctgattcctcttgtaggatgagctcaggcagctcgaatgtcagcgagtcgagaaggtcaggtcgaggcggcatggctgttcggagggagcgaggcgagggcgagcctctccgccgccgcccgcctttcgtccttgccttgccggccgacgccgaccctctcggttgcctccctcctgctcgtctcgctcatcggctcacttgagcagacttgctagagctggtgagctgtacagcagctcatccgcacagcacctcggcgtacggccgacaggcattaggcagctcgcatgccgtcctgccgggcccttcgcatgccgccgccccaaccggccgctgcctctcagtcagctctgccggacctcgctcacaggccgcattctcctcgtcctagcagcgccggcagcgcgctcgagctgccaaaaggtcgccacgacccctttagcccctcgaccgacctcgacttcaccggccgccggaggccggtccgcaggccgatcgagatcctcctcccaccggctgcccaagcagaaccttgcagccagcccagcgtgtcaaacgtcacggcacgatgctgtgcgcgacgaccctttttttccacgaatgcggcgggcccaatgctcccttcggccggttgaccgaccgagcgagcttgcaggctcggctgacggtctcgccctctgcacggcatgtcgctacttgtgcccaaccaagctcacggacggcacgctctcggacggcggcctcgatggccttacgggctgattcgccgctacactgataacgacagcggcatcagctactttgttgcctatacgctttgcatctagtacgtttcgcctcggcccctccttcgctttgggttcgaggctacctgctcatcgtccttgcacggtcgatctagcaaacaattggcgccaacagccgctacgacgacaacggctgcgtcatccgcgtcggcgagcggtgcaccggacccatcaatggcagcactgcgtgcccgctggaggccgatgcgtctcctgccggctgcggctcgacccggaagcggcgagccctttcgccccttaaggcagtcgtcaagtcgcggtagtacaaccccagacgccgcgcggccgagtctgcgtgaccggctccttcgtgatcggtgcgtcgcccctctacctgcttcttgaatgttgctgctccatcgcattgactggctgacccctcaggagcgctcgaccttcagcaacctctctttcagaccagcgccgcccttttcgtttctctcacctgccatgagtcttctgttcacgacgcgccctcggcctctgtcagccctcggcctcgccgggatgcgatgcgcctcgagcgcttcgcgctctgaaacccggccgactgagagggccgactgcactcgacctgcgtgcgtacctggagcgacgaccgagctgctcggcatggctgtcccggaaggaggaagagcagcgcaggtcgactcgcgcaggcagcttggcccgccgccctgcccgtcgacgtcgacccccttctgccaaacagacagacccaccgtcgctcctggcccataggtcatcggccatcgcaggtcgccaggcactcggcagctgacggattccttgctcaccggcggctggctatgcagcggcagctggccgagctaggccaggcagctcatcgggtcggtcgatctgtcggctcagctgccctgccggcccacccaacggctcgtcctctgtcgacctcgacagcaagacagctcgagctgcacagcgctcgtgtcacaggtgcagtccattcgctgacctcgcagtactggcacgcccctccgggcgacttcggccggcatgccgtcgacatgagcggccggccctttcacagttcgacaccccgcccgtcgcatcaccagccgagccctcagccgactcgggcagcgcatcaggacacggcagcgcgtgcgcttgcaatcagggcagcattacctgacgacgcggcctccggcggcgatggtcaggtgcatgtaggggtgtgagtcccgcgcctgtctgaaagctctcgaggccgactctctggcgccttgcccggaagaggaagtacctgcctcgacggatcacctttgtctcctctgatctcgctaggcggacctcccgctcggcaagctttcgacgtctaccgccagtcccatgatcatcccatgtcgctcaagccgtctaaaactcagtctgcggcagacgacctcgagcctgaccaagcggcgtaaggcatcccgaaggccgggcctgctcttagcgattgccgtgtggaatcctccttaactgtccgacgcttatctcggtcgcttcgatgcggcttgcgtttcatgaagtcgagacgctcgagcgagaaaggctctgggagcccaaggagtcgtcgcccgtctgagacgaccccgacttcgcattatagcaggacagacgcatcacatccgataagagatgcagatgaaggagaggaggaggcgacacgagtttgtgtaggggtccttgcagccgaccaagagacggatgcgcagagggggatgacgccgccgaggcgagcgagactgctgctgggcgagcattctcgaggatgagcaagagataaggcaagcaggcgagacggtcgacggatctcgcagctgggcttcggtgtgcaaggttcgacgatcacttctgaccggtcaaccgccgcctcgggctgtactgccgcgagcgaacaacctcctcgagtggcgagaggacgcgccgggcccggatcgttcggcagttggccggaggggcatcggccgtgctcgggcaccgcacgtctgggaagcggcgtcgagtctcgccgttgtccttgtagtagcattggacctcggtcttggatgcatcgtttgtgctgtaccggccgacaacatcagcttctgcgacagactgagacggcgagctgctgatcggacgtactacctgcaggtcgtctctcgttctgtcgagacgacgccgttcgggtcggtatcggtcgtgatggcctctgtgaccaaggcgtcgatctggacgaatcctgcgatggacgggcacttgtagatgcaagccgttccagctggcgacggctggaaccgcttaacgtactcgatgccgctcgccccttgcctgagctcggccgaggcgaagggagcggccgcgaggagcgaggcggcgagagcggcgagcttgagtgccgaagagaggcgcatcactcggagtgcgtgtcaaagctgagggctggaaggaggagcgggcgagcgagaagggcggcggcggcgagaaggtggtcattagagcgaaagagggcaaggcgctttctcgaaagagcagagcagagcggcccagcagaccgccgagctgggtccgggttcagatcctgcaagcagaaaagacatgctgccggtggcgtcctcgacttttgcgtggacggaacgagcgccgggctggccgagcgtgcttggttcggcggcggcgagtgagcagcagcagctcgagcttgtggacagccatcactgcctgaccgaattgggacagcgacgctggcagaatcagcagcgacacggccagccaggtggttgtgccaatgtgtccgaggcaggagggtgggcggccgaagactagcagcgaccgacccgaggctgagcaggggtgccccttgccagctgaaccaggacgcatcagagcagccgcgacgggcactgagcagcatgccacggagaggaatcagccgatcgaccgtactgcgaggattgaagcgacgttgcgagccgagcaaagggcggccgagaggatcatggttggagggagtcagccttgcggtatggcacagcgcgcagcggccgtcgggtgactggagggcctccttctgagccacactctcttgcgatgacgaggtggcgatattgggctggcttgtagaccatacccgtgtcgtgtacgatgacaatagtcacgatcaaggcgaccactatgacagaagagggctggctgccctgctggcgagcccctcgagacgattgagatcgagcccgccctctcgctcccgtcccggccccccaaccacgatcgccccacctctgggcccttaccagcacgcagcatgacctttccgacggtgctcgcacccttcccgatcctgtcgcaggccttctcggtcctcggccaaccaagtctcgcctcgctctcgtccggttccggtgcctcgccatcggcctcgcgcgtgccgggcggccaagccaagcgcgtcgtcaagctccagctgcccggcctggccttcgatgccggaggacaacagcagcagcagcggagccagcaggagcttcagatgctccggcggtcgctcatggtcctcctgacgccgccgcagacgttcgttgcggccgccgtgtcaagctcgacggctggcgcggccgatggcggcgggctcgcgccgcctcctccccagccggccctgcccgccagccttcagcagctgtacgcggccgtccggtcgctcacgaacgcaggcagcggtgccgacatctgggatgccgtccggctcgctgtcgagcgaggagctggctcgttgggaggcgccatccgagcatcggcgccggtcattgccgacgtccagaaggaggtcggcgactgggcgctctggctcggcgtccttcttcgcggctggaactggtggaaggctgtcactgtgagctcgtccccagaccgttctttgttcgcacgtcaaggctgacactggtcctgtcgcgcggttctgtgcagtcgacgctgcgatcgatcctgctgccgctcacgcagacgtcgcatatggcttacccaattcagtcaatcctcgacggcgccatgtcgggcgtctttgtcgatgccggtcacattcagatgcggacgacccactccttgctcggcgcgatcaaggcccggcgccaggtcatcacggtcgccgacgcgcggtccgacgtgcccgtcccgccgatcgaccaggtcgttgtcgacgtcgcgtgcgacctgctcgcccctctcggcctcctgaaggatgtcttgaccgaccgggtcgacgacacgtctgaagaattctataccgaccacgcccgcaccgagtggacctctgcggctgtccgaccgggcgaggtcgcgcccgtcgtgacgcatctcctcctgacggccgcctacctccgctcggacgaggcgctctacgcccagctccagctctcgtcggccgtcacgtctgttctgctcagcaccctccttaagacgatgctccaggatggctgggtcgtaccgatgatcgagcgcggtctggccgccctcctcgtcgacttcgcgccgctcgacaacgccagcgactcgaagggcaaagcgcgcgaaacggtcgagcagtgtgaagctgagcatggtctcgctaccctggcctcgctcatccggcgcatcggtcgaggtggcgagctgcgcgggccgtggggcgactgggtgcgcaagcaggtcgagagcgtcatctgtgaccccgccaacggtgcgtccggcttcaaatcggctctcatgctgcgaccgccagctgacctgctcattctcgtttgctcgccgcagacgtcaagttggtcccgtcgctgctctccttccgcgagacgatctcggcccttctccgaggcccgctctcgttgccttcggcgaccgagcctggcgagcgggacgaggacaagcagctgcgcgacgcaagctcgagtgccttccaggctggcatgggcagccggaaaaataagccggccgagatgatcggtgcgtcggccctctgtgtcgagcggcacgcgctgagtgactgacgcgggctcctcgctctttgctcttacagccaaggaaatcgacgtccttcttcgatcgaaggcgacgtcggccgactcggtcgatgcgaagcttgactcgctcctgacgctcgtccgctacacgcgtgacaaggacgtcttccgcgccttctacgtcgccgcgctcgccaagcggctcctcctgaaccggtcaagctcggaggacgccgagctcaagatggtcagccggctcaagaaggagctcggcgaggactttatgaagggcgacggcatgatggccgacctcaagctgagcgagggcttgatgaagggctaccgcgcccgcgtcgctccggccgacgacatggacctctcggttaacgtcctgagcgccgccaactggccgacgtgcgtcgctcctccttccaccttgtggtttcgtgcaggctgacctcgactctgtttcttgcagctaccctgcgctcgacaagggttgggaagcattcgccctcccgccgacgctgaacgccgcgctcgacggcttccggtcgttttacctcggcgctcaccaaggccgcgtcctcgactggcgctaccagctcttccagatgacgctcaaggccaactttcgccgcggcggcaagaaggagctcggcgtcagcctctggcagggcctcgtcctcctcgcgttcgaagacgtcggcgccggcgagcgcaagacgtttggcgagctccaggacgagacgggcatcgagcgagaggagctccggcggacgctccagtcgctcgcttgcggcaaggagcgcgtgctcgtcaagcagccaaagggccgcgacgtcgccgatacggacgcctttgcgttcaacgacgactacagctcggagcgcttccgggtcaagatcaaccagatccagcaggcccagagcaaggaggaggacgacaaaaccgagagccgcgtcatgcacgaccgctcgcacctgctcgacgccgccatcgttcgcatcatgaagtccaagaagcgcatggcgtggaacgacctgacgaacgccgtcgtcgaggccgtgtgcgtccacgagacctcctcgcgctgttgggtttcctcaaagctgatctggtctcctacgcggtccctttaacagccgcaacaagtttccgcccgagcccaaggcgatcaaggtccagatcgagagcctcatcgagcgcgagtatctcgagcgcggcgacgaggacaagggtgggcgtaagagcttgacgtacctcgcctgacgcgcagcccctgtattcgctcgcctctcatcggtctctgggccagctcgcagattagcatgtcgtctatttctcggcccaacggaaagccttggctcggttgtggcggtcctcgggcagggtagaccttgaagtaggggcgacgggcggaacgacggtgcgactcgatgcgcgcgacgcaaccccttcacccggacactctcctcccctttctcgatcaccttccagctcgcctgctctagcaacacaatttctcatgggcaacaccatgtcgcaatccgaccagacgatctctcccgccgatcttgacgcacgggaggagcatcggtaagggctgcctgctcgaggtaggggcgacgccggtcaacgggagctcatccgcagtctcctctcgaccctcccgctgacgttctctcgagtccgctctaacacaggcagctcacgcttgacctcgactatgccatcgccagccgcgaagactggcgttggcggtaccacaaggagcaagcgcgacatctggcagaggtcgagacgtatgtcctgagctcctccctttgatcagctgccgattacgctcgagctgaccagccccggtcactgccgtccatcctgcaggctccaggccgaagttgcaaggctcgagcgcatcatcgccgtcgtggacgacgtcgccggaggagccgacatgagacgcggaggagctaatctcgaccggggcatgcgtcagacggagccggactggcccgcgttgcagccatctagcctcgaccgtccgcagccgaacgagctcggcctcccccggcttcagcaactcaaaacttttatgaagggtctctacctgtcgcctcggagcgcgatcgcgcgtgaaatgcttctctcgaacgtcttgcaggcaatcgaccggctctcggccctgcctaacggaccttgcttcgtccagtacctgggcggcacgtgccagcatcggcagaattgctggcactcacaccgctctggcgagtctggagtgtcaagtccgagatgtctcgattcgatggagcgctgaccattgttcgctcctcgcaggcaagctgactgaggccgagacgattgcgatcaagttcatgcggaaagagcgcatacgtctcttctgccttttttaccgccgactggctgtttccttgctgacgccgctagtttgcagggctttaaacaccacaagctctcccagctcaagcaggaacctgccatgtctcatgcctgcggcgcgtcgcccggtcaggccaggtcgacctggccggaggtgttgctcgaccccgacactatcggctcgctcgaccatggcggcgatgacgacacgagcaacctgacggttctttcctgttcgacgttctcctcgtccgagtcgtcaaagcgctcctctgacgatttgagcgacgaggccggcctcgaggaaggcgagatcctcgagaagaagcgccggctgtcttaggccactcgcatcttcgcattctcctcttgcctcctcaaccttacgccccatgatgtcctcatgtccttcccatcagaccctcgtcttgctcagcgctgctcgtccgagtgccctggtgaacggcgacggtagttcaaactccgtcgggaggggcgcccctattccgccgacggcgacggctcgacggccgccttccgctccccctcgaccagcacctgcctctctggacctctcgcaggcgcttctcatgggatgctcaacctcaaagcccgagacggcgccgctcgaggaggacgaccagctccgccggctgaggtgcgtctccttttgggcaagcgcgatcgcactggctgtgctggcgatgccttccctgacaccctctcgccgcacactatcctgcgtcaggtcgtgccggcaagacccgtagcgtcgacgagtcagggacgatccgaagagctgtcgcatcctgtccaggcgagccgcccgcgacacgacttggtgcagctgtaggatcttctttccctgcttttaactctgatcgcgctttcaaaagccgggtggctactcggatttgctctcagcatccagtcacgtcgctcagccaagctgacccgctgccatattcctcatcttcacacggcacgaaatggtcgaatgccgagcaggtcgcccttcgttccgtgcggacagagaaggaggtcaagtcgtacgtcgaacggcaagccgaccattcgcggcggacgaccgcgtccgtctcgagtttccgagggcctacctcgccgaatacgccgacaacgactcgttcaaccccgagaagcaggcccattccatcagcgatcgctcgtgctcgccaccgcccctgctagtgccgcttggcaagcgaccgtggctgcccgctctctcgcgcgtcgttctccggctccgctatgactcggcaggcgctctgttcagagtgactgtcggcacgcttcttcctcccgctagcattgcttacaccagccggccaaatcactatctatgctctagcagtcagccaacctgaaagagaaatgcactgacgccagtcgatgagcgtcctggtgcaccaatgtccagcgcaacccgccgtccttcgtcatcggctcggccttcgccagtgtcaccagtcagctcatgactcctatcgcccctcggccgactctggcaccattcgcgctagcgccagcgccgccgccgttgcctcccgatatctgggctggcctgccagagtcgcacgtcgtcgcggcgagcatgaagcgggcctggtcgcggccccattgacggccgtcggatcgaagggaggcaccgctggccccgccgaacgcgatgatcagcaggaatcgcacgaaaagaagcggagcaggccaagctaggggagcgctggcttcgatctgatgccgtttgcaggagagcgctcgctgacctggctcagccttcactctcttacgcgtttaaccatcgaaggcggcgacgggacttcatttcgcgccctccacctctctcgaggggcctgagcatgacgtgggcctccgtttcgctggctttcggcgagtcggcccgcccgcgggcaaacggtgtttctcgatttcagcccgctcttccctccaacctccatcgtctctttcttcccctcacccgtcctcccttttacctcaatccaactcagccaacatgtccgctaagggttacgccatcgtacgtctgctcacagctcactagaactcgacgctcggccgctcgacttggctccccctcagctaatcgctcccctccttgcagcacgacagctcgaagtacgacgagttcaagcttatcgactaccctctcaagtctgagggcgagtacgatgtcgacgtctcgatcgactactgcggcatctgcgcgagcgaccttcacaccatcaagggcgccgccggctggggcgaggtcgagcttccggtccgtctcgccgctctccgcgtcggaggccccgctccaccctcccggggtacgggtcttcggcacttgttgttcgcaggacgctgatagcgcccgtctgccctctcttacccggtcccgctgcaggtcgtcgtcggccacgagtgcgtcgcttctgctgactttggtaacacctatgctcggccactgacactcggatgtcctgctcactaaggatcaccggcaaagtgacatcggtcggatccaaggtctccgaattcaaggtcggcgactctgtcggcgtcggtgcccaggtctcgtcgtgcttcgactgcaagatgtgcaagaacgacaacgtacgtcgttttcagagctgaccgggctactgtgcacgctcgcagacctctgctgaacctactgtcttcccaatccgcaggagaactactgccctgactgggtcgacacctacaacgcgaagtaccccaacggtgacaaggcgactggcggttcgtcccagctgccactttccgcctcactccgcctcgctgacgccttccttgcaccccgcaggctactcgaccgccgttcgcgttcacgagcgctacgtctttgccattcctgaggaactcgagccgaagcacgccgcccccatgctctgcgccggtcgtgcgtctctttgtctgcattcgctgctgcatgaatgctgacgcactcctctcgctcctctcagtgaccatgtactcgccgcttgtccgcaacggcgccggcccgggcaagaaggtcggcatcgtcggtgagtgggcttctcagttgcgccctcgatcctgtgctcgactgacttagtcggccctcgtctgcaggcattggcggcctcggcatgttcggcgtcatgttcgctaaggccctcggcgccgaggtctacgccttgtacgtcgactgcggcccacccatcagaggctgcactcgctcacattgctctgctcccgtcagcacccggacggacaagaagaaggaggacatcctcaagatgggcgccgatcatgtcattgctactggcaccgagggctggcttgagcgggagaagcttgcgtacgagctcgacgtcatcatctcgaccgtggacgtggcctcaggtatgggtctcaacgacctcctctcgtcgctgaacgtcggcggcaagcttgtctcggttggcctgcccgatgacaagatcgacggcgtccacccgtttgccttcatcaagaacggttgctcctttggctcgagccacattggctccaagaaggaggtacgtccaggcaggctgcagccccgatgaagagtccttattgctgacatgctctctcttgccctgcctcctgccctccaggccaacgcgatgctcaagctcgccgccgagaagggtatcaagccctggagtgagtctcactcctcgatcctgtggattagacgctcggctgacgcatctctctttgcctcttggctttcagtccaggagatgccaatgtccaaggccggcgagggcatccgtatggtcgacgagggctcggttcgctaccggtgcgttcgtcttgtctcctgctctccccgtagacagcttgctcaccgcatcttccttgcttgccaatccagcgtcgtcctctcgaacgacatcgacaagtaatgcgcttcttggtttgccagcttagagtgcgtttcaagggttgagggcaaagagagagcgcgcgatactgtatcgaaaccagccgccggacctatccattgtagtcttggacgatgatgttcgactagacgtagctgccgagtgatcgagtgcgcaagcaaggaaggaggtgacgcatggatctagatctcgacgtaggcggctgcgacgggcaagcgacgggttgaggccgaggcgtggagccagcctcgtgccggcgggcgaaggaaggagatggccgagttggtgtgagtgggagtggaggcggggattgaagaggtggagagggcggcgagcgaagcggataaccagtcggcaaagtagctggccacgcaaagctgcccgattggagtgaatgaagatgctgccaggtcctggacgacctaaggcgaggaggagaggatctgagtgagcgggcataacaaaggccagcataacatcagtcgccacgtcaggggtggataagaaagggttgagacgtacgagcgagtccacttgacgcgagacgtcaacaaccgtcggctcgtcctcgacagccagcgtcccgttttcctcgtccgccggttctgaagacgccgcgtttgacctagacgggctcgggcgatcggcagcagcggcgagtgcagccgcgtatgcctgctcgagctcggccgcccggcgctcgaaggcctgctgttcggcgggttcaagcggggctggctgggcacgcttacaggcgcaggtgagcttgctcttgagtgtgttggggctgacagggattaaggtagatcatggtcagcgagtgaagtctggagacggcgagtcggcctacgtacttaacttgctcagaggtgatgacggcgtccggctcgtcgtccgagaggaagctgtcgtcgagagtggggtcgaacgactcgtccgtctcggaatcttcatcgtcttcgacaaccggtgttgacgagagaaaggcgaccgctggcgagaccttgggctgcatggcggccgaggagcgagtgaggcggggggcaggggcggccatgttgagtgacaaaggcgggggttgtcacaagggaagggcgtggtaagtgatggatcagcttcctgcatttagctctaggcgcccgccctttatggccttcggtcggccggatcgccccataaggtcctgccggtagattggaggtgcggtgcgacacgacgcctcgaaaagaagccacgacgccttgcgacctgttagggttgcgctccgaaccctttccgttgcgaggtgacccgcgcctggcaacgcgccgcaggctcgcagacttttggttctctccccggcacgacttgcatcctcgacagtcctttagtgtcgagctacaagtgttcgcttatctctccccctctctgaggacatgtactaaattcattgttgagctacaggtcaggtcacatcgacccgccgcagcactgactagatcgatgcaggcagccaggatcagacgagagcccgccgtcgtgcatcgcttctgacgcagtgagatgctggaggggcaacctctgactgaacactcaactcaacccacaatccttccttcccccagaccgacctacacattcagcatcatgtcttccatggaggtcgatgaggcgacgatcgagtgcgtcaagttttgccaggacgagagctcctggctctgcaggcgagcgtctgtcgacgacgagctccgagctgaccgatcgagctgcacccactccttgtctttctcagcgagggcctctactcgcggcagctgtgagtgccgagccttttgatggcaggtcgtgcattgtgctgatcaaccctccctgtagctacgtccttggccatgagggtgcgtctgtcgactgctcgcagcggctccgaggctctgcctcgcctgcgagctcgcggctgacgctaatctttacatttctcgctcgctgctccatattcccgcagcaatgaagaagatggcgctgtcaaacgttctcatcatgggcgtccagggcctcggtgttgagattggtgcgcccgtcggccgcgagctcgtgtcgccacctcgtcgtgcttgccgcgcagggcccctgaccgtctctaatcctcccgcccgcacacagccaagaatgtaatcctcgccggtgtgaagagcgtgacgatccacgatccgtcgccagtcgcgctcgccgaccttggcacacagtactaccttcgcgaggctgacgtcggccggccacggggtgaggtgacggtcccgaggctggccgagctcaactcgtacgtgcccgtgcacaacctcgaggcggccgagctctcggaggaggttctgggcaagtatcaggtgtgttcgcctccagcgtgggggcgcaaatcacgacttgtgcctgacgggctcctgctctgcttgctcaggtcattgtcttcactcggcaagctgcgcttgccgaggcgctccgaatcaatcgcttcacgcacgacagcaagattgccttcatctacgcttcgacgaacggtctttttgggtgagtcgtctgcgaccagcgccttcctcggcgtgacagtcgctgacgccaaacctcccgctgacgccaaacctcccgctgacgccaaacctcccggcagctctgtcttcaacgactttggcccggccttcacgtgcatcgacccgacgggcgagcagccgctgacgggcatggtcgtctcggtcgagaatggcgacgacgcgatggttacctgcctcgacgagacgcggcacggcctcgaggacggcgactacgtcacttttagcgaggttgtcggcatggaggagcttaacagctgcgagccccgcaaggtctcggtcaagggtgcgtcgagctacgagcgtgctttggatcgtttgctgcgcacgcactgactcgcttgctctcttggccaaaccccaggcccctacacgtttacgatcggcgacaccaatggcctctcggcgtacgtccggggcggcgtctttacgcaggtcaagcagtcgaaggtgattcagttcaaggcgctggccgagtcgctcaaggagcccgagctcttcatcaccgactttgccaagtgggaccggccggcgacgctccatgccggctaccaggcgctctcgcagtttgccgcgcgcgagggacggctaccgggcccgcattcggcggcggacgcggccgagctcgtcaagcttgcgcagacagtcgctggcgagaccgaggtcgacgccaaggtgctgacggagctcgcgtaccaggcgacgggcgatcttgcaccgatcaacgccgtgatcggtggctttgtcgcccaagaggtcctcaaggcctgctcggccaagttccacccgatggtccagcacatgtattttgactcgctcgagtcgcttccgaccgagcccgcgacggccgaggccgactttgcgccgaccggctcgcgctacgacggccaggttgccgtctttggcaaggccttccagcagaagatcgcctcgcaccggcagtttctcgtcggctcgggcgcaatcggctgtgagacgctcaagaactgggcgctcatgggcctcggttcagccccgggcgtcaagattcacgtgaccgacctcgacacgatcgagaagagcaacctcaaccggcagttcctcttccggccgcgcgacctcggcaagttcaaggccgaggctgccggtcgggccgtcgtcgagatgaaccccgacctcgagggcaaggtcgagacgcaccaggaccgcgtcggcgccgagactgagagtgcgtcgccgccctcagtcggacatcgtgcgagcgtttgagagttgattttgaccgtcgctgcccctgtcagacatctacggcgacaatttcttcgccgagctcgacggcgtcaccaacgcgctcgacaatgtcatcgcgcgccagtacatggaccggcgctgcgtcttctatcagaagccgctgatcgagtcgggcacgctcggcacaaagggcaacgtccaagtcgtcatcccgcacgtgaccgagagctactcgtcgagccaggacccgcccgagaaaagcattccaatgtgtacgctcaagtcgttccccaacgcgatcgagcacacgatcgaggtgcgcctggctgtagcgctgagagaatctacacgctctgaccctttttccgctccctccgtttacagtgggcccgcgagcggttcgacgcgctttttgtcgacccgccgacaaacgtcaatctctacctgtcgcaacccaactttgtcgagacgacgctcaagcactctggccagacgaacgagcagctgaaccacatccacgagtacctcgtcgcttccaagcctatttcgttcgaggagtgcgtcgcttgggcgcggctcaagtttgagcacgactatgcgagcgagatcaagcagctgctcacgtcgatgccaaaggacgccgtcacctcgaccggcgccctcttctggtcgggcccgaagcgggcgcccgatgcgctcgaatttgacgccgaggacgtgcgtgcccggcatggcctgctacgtgcggtcgctctactgacttgcctctatctctccagccgacgcacctcgagtacgtcatggccgctgccaacctgcacgccttcaactatggcctcaagggcgagagcagcccgtccgtcttcaagaaggttctggcctcggttgaggtcccggcctttgtcccgaagcagggtgtcaaggtccaggtcaacgacgccgagccggtcgccaacgacgatgacggtgcgttccgactggagagaggcgtccggctttagacttgacgagctgacgccctctcggccgacctctttcgcagaggcgcccgacgccaagcagatcatcgaggctctgccctcgccgtcttcgctcgccggctaccgaatgacgccggtcgacttcgagaaggacgatgacaccaaccaccacattgcctttatcaacgcagcctcgaacctgcgcgctctcaactatggcatcgcaccggccgacaagcacaagacgaagcagatcgccggcaaaatcatcccggcactcgtcacgacaacctcggtcgtctgcggactggccgtcctcgagctctacaaggtgcgttgacaaaccatcggtgatcgcagagatagcctgctgactcgctgattgcgctgattgcagatcattgacggcaaaaccgacgtcgagcagtacaagaacggctttgtcaacctcgctctgcccttctttggcttctcggagccggtgctcgcacagaagtccaaagtacgtgcctcctctgtgccacgcctacctggctgcagctgacctctttgatctgctacttgcgttgcagtacggctcggtcgagtggacgctgtgggaccggtttgagcttaagggcaacccgacgatgcaggaggttgtcgattacttccaggtcaggccgcacccattgtctctgtccccaccgaggctggtactgatcgtcattccgctcgctcgatagaatgagcacaagctcgaggtgacgatggtctcgcagggcgtcagcatgctctggagcgctttcacgccggccaagaaggtgagttctttttcggagcgatgggcggcgaccttccgcgtctgctgaccggcccttattcaaccctttcttgcagagccaagagcggctcaagatgcgcatgtcggacctcgtcgagaacgtcagcaagaagccgatcccgccatactgcaagaacctcctggtcgaggtcatggtcaacgatgaggagggcgaggacgttgaggttccgttcgtcgtcatccatatctagttggccaaaccggctttacgtaacaccctctgcttgatggccatgggcttccttttgattgtgaccggcatctggacagggagcaggatggcttctcggcagcccgaagggggtcgcccgaactggtcaggctcgggctctggcgaccggccgaaaaggatctggagggcgagcatccgcatgaaaccggcttaagagcggatggtgtcctaaataggcacccccttgaggcacaccgtctgcgagagaggtcttcataacgaagaacagggaggagatcaactggtgtttcccctcaaggctgagtagaagccaagctactcaccaagatcgaggctgacaagcgctctcttacgtcctttccaaagcgcggcgttggcggacgatgggtgtccggcgcttcgggtcgcactggcgtgcttggatgagctgctcgagtggcgtgaggacacgccgtttccggagggagggcaggccggtgacatgagtgctgtctggggtcatgctgccgcgtttcgcttgccgtcgaaggttaagccccccgccctcgccgtcctccactccatcctacaggtagagtcaacggtcctagagcaagcggtcgtccccttccccccggaccagcccccgccggtcaaccccttttactccgatccgactggcgacctcataatcgagagcagcgacggctatcacgcgcgggccaaactcttccgcctgcgtgccatgtcaggtgtctttgacgaccggctcgaagacggcattcctgcgtcatggccgcgcgcggccaatggcacagccatcttgcgcgtgcgcgagaacaaggacgagcttggcctgctcttgcgttacggcctggctgcgcagccggccagtaccgccttgcgctacgagatgattgtcaagtgcgtctccaggactgggctacctgcgacggctgactgctgacgcgtcgtctcgaccgcccacaggctcctcgacgtcgccgacacttaccgcgctcaaacgcggccttgatcgtcgtctcgcagctaatccacttcactccgaccgaggcgcagaccgtgtttccactcgccgccatccatggccaccagaaactcgcttgagccgcgctcatgcgcatgggcgagtcgctcgagattgtcggcaacgttgacggcgccggccggttgaccggccacctcaccggccaggcctgcggccttgtcggcctaccgcaggcgctgtttgtccggattccgccgtaggcgctctatgagctcatccgggtccaacaggccgccttcttcaccgagaacgcgactccgatccgcgacaagtgggccatggccgtcaaacgcttcaacgtgcgtacctgcttctcgtcccttggcctactcatcccgcgactgatcttgcccacctctcccgactatcagctcggcaccgagccctccaagtattggtccctgcgtgactcttcattccgccctctcgatcgactctcgactgaaacgacaccgtctcgtcccatgccgcccacgacccatcctccatgcacgccttcctcattctctgtaaccccctgactatcacacaatgactttgtctatccgtcggccggcgtgtcgatacaaagggggtcatggtctacagcaggactgcgcaagccagcagaatggcctcgcgctcgtctcagaacggacgtacgaacgcctgcgctttactcgcgccagacgccctcaatcctcggcaccgcccagccagcctcctcgagcttctcctcgccccaaccgaggatccgcatcatccctccgagcttactctcgacgcccctcccctcccgctcgagcagcacgcggttggcctcctgaccaacccgcacgcgatgcgccggcgagaggagcgcctcgagttcgggcgtcgggtacgggcccggcggcggaaaggcgaggagcgtgagggcgagctcgagctcggagaggagagacgggtgcgggagcgcgagcggggcgagggtcgaggttgcaaagaggagcgcttgctgcgggctggccgggccggtcgaagtcggctggaggagggcgaggaagcgcaggagctggaggtggaagtagagcgccgcgttctggtcaagaatctgtccgcgaagtcgattgcgcacggcaaagtgtcagtcaggtcagaagtagaggtcagctcgaaggcttatgacgcacctcggcgtccagctcgttgatgtgccggattgcaaggtcaacctgcccgctctcgagcgcctggcggataagcatcctctcctgcaggcggcgcaagcgcaacgagcagtcgagcgaacgcgagtatacacgggcgagcgagcgtgcgtgcagtcgtgcggataacagttgggcgaacgaggcgaggtgtgacggaattcgcaagacggacggtgtaatggtagacgaagagttcattcagaaccggcccaaccaaagggtaggccgggcagtcgagcaaaaggactagccggcttacctcgatcgcggtcaggtcaagcttgtcggcattgtcgagtgaaccgctgccgacggcgccagggccggccatcgcatcgtcgtcgtcgtccgagctcaaatagccggcatcgcccttgcccggcaggtagctgccgcggtcagacgtctcgcggaggaactcctcggcagcgtcgcggtagccttcgacgacgaggtagtcgagcacgagcgcgttgagctgactagaagcgatcaagagggggaactcaagggtcagatttgaacagagagagcgagagaggcgacgaaaggagaggcccgagatgtcagagagcaatgattaagttttccgcaattggtttaggagagattcccacaatgctactagggtctcatcattctaccgggcctctgcagctcgtcgcaagggagaaaaaactgacgacttggtgatcttgacgtcggcgaggcgcgacgaccactctgcgtgcgagacgtgatggcgtggcggctgagcagaagaagggagaaactggcaacgtcgtcgatcgatagaggtcagcgatgagtgacgacgacgactggcaggctaatgggcactcacgttcgacatggtcttgatgcttgagccctctcgacgacggagggcaggcgggtggtcagttccgggcgagagcgggcaggagggaaggtggtcgtttaaagcaggcgagcatgcgaagcggccggcggttttgaggcgcgagcgcgccggttgcgaaccgcagatgcacttccacagcaagacgctcgcaggcacttgcagcaagggcgacgaaggttgaaaacggcatcatgaaggggaggcgcagagagggcctgaggagcataaggaggcgcggagagggtcatgaggagcatgaggaatgggcatcaggggttcgggatgagcttgccgcagacggtgtactttcgctcaaagtgctcgacccagcctgtaagacgcaccacgaggagtgcgcagatgggtcagcgacagctctctagaaacccgaggcagagagggagcacttaccgtccatgttctcgctagttcggtgcacaatccaggcgggagtcagctgcgtcagtcttcagaaccagaggcgcataacagccggacgctgccggtccagacgagccagactatgcgagccattcaacgcgtgcgcgcaacaactcacatctcggcgggcgtcaggtcgtcgagcttgtcgatcggatcattgaccggcgtcagcatgtctaaagataaggaaagcggtcgtcagcgagggcgtccttgattgctgcccggcgctcgctcttcgagaggcgcatgctctgtcacgagcatgattcgacacaccttcgtcgaacgactgtttggccataccgcggctcgcgtcgcgcccggcaaagttgccataagcgccgtctgagaggcgggtcgggagggtcgcaagcgtcaggaggagggctgcgcgcgcgtgcctcaggccgttctggcaggcgagagacgcaccgggcccgtagaaatttcggccagccgagacgtcaaagacctggcccttgatcgcgagcaggatccgcccgtccggctgcttgccgtcgaaccgtgcgagctccctcggcgtatagtcgcggaggacgagcggcttcgggcagcttgcgggaaaccagttgtagctctcgtggtgcgagctcgcgagctgcgagtaggccgttgggagggcgactgagggagagacgagcgagtagagaaagtacagcggcgggagcgtgaggaggagcgggatggccgtcgaggagaggaagtgcgacgaggtcgacatggtgctggagtcggacgagcgagcgacaggcgagcgggctgaggactgacacgcagcagaacatggtcagcctggcgacgattaggcagcctggcgcctccgccatgctcactgagtgtttcctggactggcagctgtctctggcgaggatccgagtggtcgtcttgcgggtcgtcgtcggacgcttcaaccgaccatctcgcttagccgcaccctcgccctgaacgtcgaccaccttgccctaccctttcaccacttcttcacaaacagctctagccagaccgaccggccgttgtcgtcgtcgtcatcttgccgtcattctcgcctcgctcgtccgccgaccttccgcgcttgtcgtccaggctgcctaccggtcgtcgtcgatgtcggcctcgtcttccaccgtctccgccctccgtcgcccgctgctcgagcggacgccgtcgacccctccgctgacagaccgtcggaaggagcggctcgcgccaaaggtcaaggaggcgaccgaggccatccagcaggcgctcgagcagtatgggtgggtctccctatcctaggtcacacagagcgcgagctccttcgccgatgtgaatcgggctgacatccggcgagctcgctgacccggccacctccgccctccgctgcaggctcgacaagctctcgctcagcttcaacggcggcaaggattgtgcgtctacgctctgctaggggcacattctgagctaggctgacgcactcctcgtctccatctcggcggctgcaggtaccgtcctcctgcacctgctccactcgctcctcccaccacctccagcagaagtgcagccggcttccattggctcatcacagcctcccgcgatcgccgttaccgccgaaggctcttcggcgcttgcccggacccggccgccgataaaggccatctacatcactgccccggcgcccttcccgtcggtcgaggccttcgtcgacgactgcgttgcgcactacgggctcggcctcgtccggatcggtgggggcatgaaggacgcgcttggagcttacctcgcagagggcggcgctggcgagggagtcgagggcgtcctggttggcaccaggcgaggcgacccgcacggaggtgcgtccattccgcctactcaactccggctcagcgactcggaaggttgaccgaatgctgttcgctcgccgttgctctctagccgagctctcgctctttcaaaagacggatccgagctggccgcagtttatgcggatccatccgatcctcaactggtcctacaccgacatctgggactacctgcgcctgcacgaggtgccgtggtgcgatctctacgatgaggggtgcgtccgggcggccttaccttgagtcaagggcactggctgaccgccgtcacgaccgacaaccagcttcacctcgctcggctcgcagctcaacacgcagccgaacccggccctcgcgctctcgccgcccgcgccagatgggacgtttgatccggcctggaagctcgaggacgagtctttagagcgagcaggcaggaatatcgtttcggctaaggtgcctgcagaggatgacgtcctggcggacgagaagacgaggaaggcactcgaggaggacgtcacgggcgatcggagctgagggggggttcgtcgtccctcacacattgccgaacgagtcttccaggagaggcaatagatagcctactttgtatccggtcatggacgctcgctcgcttgccacttgcaggggtccagaggcggcaaaggcgacgaccaggggtcatcgttcagaggacgtccttccagcgcgcaaagccctctcgccaatcccgctcgagctcggcgatgaacttagccgctccgtcttgggtcgccaggcggaagcatcactctgcgccacgcgagcggtcgttcgtctggaagacgcggacgagccgctcggtcatgtaggcggtgtggtacgccgcggaaggcgcgccgaagctcggttgcgtccagtcgtacctgcgcagacagacccaggcagccagcttcttgcgaacgactgggagtgggctggtgggtgagcgcactggtagttcgagttaacgacccattcgccagggttcggcaccatcacacagatctcggcccgcttgctcgcgccgtgcaggtggtgcgccgccgtctcgagccacagaagtgacttctcacgaatcgcgagcagatgccgacggagcgtcctcgcgatcgactcgccggctgggaggagcgtcgacaggaggtgggctacattggcgacgagcgtcgataggttggccgggagggtgggaaagtttctatagttgatgctgttaatgaccgagtcagcgccctcgccgatgagtcggccgatgttgagcaggtagcttgtcaacgcgtcctgcattgagatccagccttcgcccggggcgaccgaagacttgagcgtctcgagctcggccgccgagagcgtcaggtgcacctcttcggtcgctgcagccgacgcgccgtaacgctgccatccatcggcgaggccaaagctcggcgtgagcatcggagttttcatactctggcaacgccttgagagggagctcgaccgggatgtgtgggccaaaagtcggcctgggctcgatgacggcctccggatcgacgtagagcaccgagaggacctcaaggaagcggagcgccgcagcgccatcgcttaggatgtgcccaaaattactggtaagcacgctctggtagagcttaaggaggagcgtaagcctaactacgagaagcggtgcgtgattggccgggtctaggagaagaaacgagccggcgtcgagagcggggacgtaagggtcgagcgtgggctggacggcgcggccgtcgacgaagggcagtgagctcgcgtccgagcggacgacgcttaacgggatctcggcagccgtctcgtccagcgcaaaggcgtggcttccttctccgcgagatgcgccaggaagcctggtacagcgcgaggtgaggatcgggtagtgatcgtcggcgaagaccgccttgagcgccaggcgaagccggctcgggtcgagcagctcagaaaggacgagcgccgaagcgaaggtgccgacggccagagcgagatcgggtggatgggtatgagagtctgaggcatcttgcgtggtagcatagagtgggtggtggttgcgagaggagccagaggagaggagcccttgccttcggcttgccctccgactcgaccctcggctctcggctccctattttggctccgatatcgcaatcgtccgacccactctcgtcatgtgcggtcatcaggatcggtgcaggaaagtcgtcaagggaaatggtgggaaaaaagacagaagtattttaatgaattgctgagcttcagacatggccagcggcaccgaaggtgacccggggcgctgtcgtcagcaactggagggaagaaccgaaaaggggtcagcgcttcgcccccacttgcgaccttcactcgaaacgcgggacgcacagtgaacttgtgtgccagggcgggccagggtttgagcgccggcagaggctgcgagcggacgcgctcgagggcctccaggccgagcaggtcgaggttctagcggattgcaggagcgagcccctcggcgagttcggccgggatgagcaaagacatcggccggccgtctccaggcacgttaaagtggcgcagggcgagccggcagacgtcaaggttgccgtgagctgcagcgatggcaaagacgatcacggcgtgccgtggcgcgagccgagcgaggtgctgcatcccgctcgccagcgcacggggcgagtcgtactggtcggcaaggtcgatcactctgcgcggggatcaggcaatgagtcagtcaaaaggcagatcagcagacaaagcaacgaaagggtgcacctccgggcctgctcgaacgacgtcgcctcctcgctcgggtcggcagcgagcacgtgtgtgagcagcagccgaagcgaagcagcgtcctcctgcattgccagcatcggtatcccctctggcatcagatccgggagcgtctcgaggtcgtccggtagccagccttctgccgaacggatgtcgcggcgcaggtcggccgatcggacgcgtgcgaattggtgattggtgctctgaagcagcaggtcgcctcgcgtatcgtcaaagaaacggtcggagggtatcacaggctggcagaacggtagtgaggaatgttagtgactgactgacgccaacgcgaagaggcgcaagaggcgtacaggagcagccctcgccgctcggccgtcgtccgcgtcggagtcgtcctaaagaagcttcagactgaggtcgaccttgacttcggcaggtaccactgagggccgcgccgaagggcgagcgctggcactgggcgctggagcgacgttaggcaatactctggccgcttgtggcgctcgaaggcgggccggcaagtgtcgccgctgctgcggtggcggcaggcggtttgatcctgctactgcagtgcggaccggagggctcgcagatcgggtacgagtgctcgagcgacagggtgttgatcgctgaggctggtcggagaaaggtccctcagcatcgtcagtgacagaactcgtaactttgacgcgcgaaagacaacagagaaggactaacctgagcgggccggcgcgaaatgacctcctcggagtcgcggtcgtcgtcgtctgacgtctcgtcttcgctaagcaccatgccctgcgtgggccgagtcgctcgtcgcttggcgacctggataggccgctcgacgccggcttcgtgtcggccagggatgaccggccaggtcaatccgttgcggtaggcgttaagcgcacggaagctggcgaccacctcgtcgcccacgagcgagtagcgaaatgcgccgtcggcgatgtcaaagacaaccggcaggaggtcgccctggtcgacctcccagtactcgagcgtcggtttgctgacggcaattgtcgaaggccgaccgcctcggtacccggcgatgatgacgttgtcaaagacaaagtcgacgtggaccggctcgcccggacggcagttcttacggtaccagaacttggtcatcatcggccacatggttggaagggagcgccggacggcggtggcacgtgagtcggctgcggacggcgtattcggaggaggacgctggcgaggcggccgactgagagtctcagctgcttgccgcttcctgaaagttgagcactcgacgctggcgatctctccagcacctcgagggggtgtcgccagggggctctcttgcggcccgcaagctcgaccggtgccttggctgctgagcggcgaacccggaacgcgagctgctagagggcaagcatttgaatgagctgcgagcctctctggcctagctgtgagcggcgcatgcacgcacctgctcaagcgggaagctggagctcgatgagaggcgagagcttgtgacagttggtgccggacgagaaggaagcaggcgaaagcggagtcgagtgggaggcgagctgcgaggcgagcggctgataagaggagtgctttcgctcagctgcggcagacgtgctgccaggcacgagtaggatactaagacctactacgtcctcggaagcgcattgcagggagtgagtcgcgacggcgagtagctgatgtaggagatcaaggttggcggctgcaaggagttcgcccctgtccctgcgcgtcgaccgggcgagcgtacgtcgtccctcaacacttgtctctcagcaccggccagcgtcgcctcatgatgatgctgatagctcctcctcgtccgccacgagttgcgcctgctttccaaagatatattcaatacaaaaagggaaattaggcgtcggtgacgcagccggacgaggcgtcgctgtagaagatgagggagaagcgaagtcagccttgctgccacagctgcaagaaagggccacgagaagaacgcacgtgacgagctggagcaaagggcagccgacagcaggcacagttggtcagcttatcgggaggacggtctcggagcagacagggaatgagcgaagcggcgcaccttggtgtacttgtagagggtgcccgagctgaccttgagcggcggggcgatccacagagcccggcgccgggcgagctcctcgtctgtcacgtccatgtcgagcgtgttgttgacggcgtcaatcgtgatgacgtcgccgtcctggacgagcgctatcgggccgccgacctgggcttcagggacgacgtggccgacgacaaagccgtgcgagctgttgcgggagaaagctgtcagtgaccggctatgattgaaagcgctggcgacgctcgtcacgcaccctcccgaaaagcggccgtccgtcaggcaggcaacgtcgtagccgagcccggcgcccatgatgagcgacgtcggcttgagcatctcgggcatgcccggcccgcccttggggccaaggtaacggaggatgacgaccgtcttctcgcccgccttgattgagcccgactcgaccgccttgacgaagtcgtcctcgcggtcgaatgcgcgggccttgccggtgaagtggaggccctccttaccagtgatcttcgagacggcgccgccgggggcgaggttgccgcggaggatgctgccgaggggacgatggtcagcgtcaggatgtcgagcgctggaaaacgcgagtaaggagggcgcgatacacaccggatgtggcctgacgacttgatcggcttgtccatgggcttgatgatgtcctggccctcccacatcttccggtgcttggggtcggcctgccaccggtcgaggttctcgccgagcgtcttgccggtgacggtcaggatgttgccgtcgataagtccctgtttctcgaggtggtgaaggatcactggcgggcaggcgcttcggatcagtcacggcggccagagagtgaacacagcagaaccggacgtactcgggatgccaccaatgttgtggacgtcctccatgacgtactgcccgctcggcttgaggtcggccaggaaggggatccggtccgagaccttctggacgtcatcaatcgtcagctcgatgccgaccgagtgcgcgatggcaatcatgtgaaggacagcgttcgtcgagccgccgagagccatgacaaggacgagcgcgttctcaaaggccgcccgcgtcatgatgtcgcgcggtagaatgttcttctcgagcatgttgcgcatgacctcgccgatcgagtcgcattcggcgtgcttctcggccgactcggccgggaacgacgacgagccggggatggtcatgcccattgcctcggtcgccgagctcatcgtgttggcggtatacatctggcagagcggatcgcgaggtcagttgggccattagcatccagcagcaacctcagcaagtcgattactcactccaccgcaggcaccggggccggggcatgagttgcggattgtgtccgactgggaaaacaggcaagggtcaacggcgatgtacgctgtcacgaacagagtctacgaggacgcacgcgctcctgctcggccgcctcggtctcgccgtcctggaggtacttgccgtacgcctggaaggcgctgacaatgtcgagcttcggcccgttgccgcaccgacctgcccgaattgagccgccgtagaccatcaggcccggccggttgagccggccgagggccatgagcgtgccaggcatgttcttatcacagccggggatgacaaccatgccgtcgagccagtgaccgccggcggccgactcgacctggtcggcaatcaggtcgcgcgactggagctgcagattcggagcgaacggcggccagggcgccacatcaagaaagtcagcgcgaagcggcgcacgacacggacgaggcgcggagacacgggccgacgcactgagtacgacatgccaaaggtgcccatcgagatgccgtccgagacgccgaccgttccaaactggtagccggtaatgttggacttggccatcgactgcttgacgcgctggccgaggccgaggatgtgcttattgcagctgcgaggcaatatgcgacgagacagcagagtgagcttgcgcgcgcgctgcaagccagactagcaaaagggcactcacgggttgccctcgtacctgagagaggtcagcaaaaaggcgggacgacatcgtcagcggtgcctgagcgagcagccagacggcagagagcagccagacggcagagagcagccgccggcagttgcgaggtgcagtcgagttaacggttgctcgaggcacgcaccagacgctggcgatgccgaccatcgccttgtcaaagtcctccttcttgtcgatgccatcggtcgcgtaaagcatagcctggggtacgcagcggcacgagaagagggtcgggcgtcagcgacggtcgctcttgaggtgcgagcaggctgagctgcagctgccggcggctcacctgcgaggcgcctgatcgtccgtccagccggaatgacagcaccgtcagcagagcgaagctcaagacaagcagcagacatgcaaggccgcggacgcaccctgcgacttgggcgcggtgatctgtcgacaaagagggcgagggtcagccctctgacgacaccttgctttcggcccgcgttcggagcgagagaggcgggccgcaccgtccgcgagtagcggttcatgattggcttctcggcagcctggccgagccggaccgaggtcgcaaaggctcgccgagcagagcggacagacgacggaatcgaacgaagcatggcggaagacttggggtgagggttggaagggacgaggtcgagcgggtcgaagcagacgcgcgggagggctgggagcgaatgacagaacgagcgaagggcgtttcggccgaaggccaatccgcagcatgacgacccttcggcgactgacgatctcaagggaggatcgtcggctcaaagacccttgctgaggggcgttctgcgaggtgcatagtccagtctgagcgaccgctcacacgctgatcgtctcgagggtcatcatcaagtcatcgtccatcaaccctctcgcggccctcaaaacgaaagctcaaaccttgaggccgttggggacgatctcgatccagtagctgcactcgcggcaagcaaaggaaggatgtcagtgagcatgagcaaagaattgagagccttacgagcagcttcggagggtcgcacccatcggggtcgagggcgaaggcgatgttctgacgagcggttgaagaaggaagctagtcagcagcgagcgatgaaaggcaggatcacacgtcagacacagaccttcatctgcgacggacagaatgcagtcatggaagaagcggcgaaaggatcagctccggtgactctctcatcgtcgagcttctcgccgcgatgctgagagagaagtgtaccttgccgtccgtcaggcgcttcttaaactgaacgccgagctcctccatccgcttgcaggcagcctcaatgtcagcgaccgaaatggcgaggtgcccgaaacctgtggatgtacgctagcaggtcagtcgaactgctggcagcgtcacgagcggcgcgcgtgcgctgagagcaatcatgatgcaggaaggagactggccgcggccggggtcgctgttgcccgaggcgtagcccttgaagcccgggtccgactctgttccgtggttgtgcgtctgcgagaggacgatcggctcgtaaggtcagcggcctggctcgtcttcccccagtcgtacctgcgcgactgacgagctcgacgatgccctcgcggccaaagcggccctcgctcatctgctcgagcgtctcgccctccttggcataggcaagaaagtagagcgtgaagtcggactgctccgaggtcgccaggagcgacatgccgaggatgcgctgatagaagtcgagcgagctgcgaggaaggcaggagcgagtgggcgggtcagccatacagcagagcctggccaccgagctcagcagctgccagcactgcgttcctggctggcggaattacaccttggggtccttcacacggatcatcgtgtggttctgaggcgcagatggtcggtcagttcaggacatgccgtgattcggacggagcgcgtggcgcacgcacaagcttgaacgaggcggtcgcctggtcacgaacgatggcggccatggtgcggacagagtacggattgagaagctggagtgggttgcggtagggtgtggtccaacggaggagcgagctgagcatacgaaggtcggcgtcaagagtcgactcttgctgatgacggccgtcgtctgactgccggcggccggtgcggagccccacattcgcttccgagacggacgacgccctccgacctgatcttcgtcggccaacgacaacgaggacggccagcaaccaaggacagcagccaaggacagtattcaagcatcctcttccgcaaaacctctccgcctctcttgcgccaccacagacctcgctcagccctctctgcatggccgccgccgtggcctcgtttggccggccgcctctggtcgaccgactcctgccctggtttcggccatcgctgacgagtcggaatgtcaagacgttcatccgctgcctcgtcgtcctgctcgcgacgctcgtcctgctgctcgagacgaccgcgcttaacgcgatgggccaggcagccttcttcgcgtgcgtcctgaagcaggctagctcagttgctcgtcttgagctgatcgtctcgctgtccgaaccgattcccttttacaggagtctgctcgtcgtcatgctcacaccaaacatgccggcctcgctcttctgcttcgtgcgtcggtcgtaaaaatgttgagctcgtgcacctgtcaaggagcgcaactgaccccgctcgccgtccaggcctcgctcaccgtcctgctcggcatgctcctcggctgggcctgggggtccatgagcatggccgccggccaagccgcacgcgacaaaacacttctcgctctgcgctatcaggccgctcagcaggcggttgccgccggcccgccggggacgacggtccagacgctcgtctttgacggcttcttccttgacacgcggacatcggcgacgtatggcgctcttttcttcatcggctgctttgcgctcggtgccatccgggcgcatgcgcctaagcttacgctcctgtgcgtctcatcccgctgtcgttcacctgcagcggccctttggctgacccactggctttcccgcacgacgccaggtcgatcttcgcgtcgatcgtgctcgacgtcttgatgagctacggcccgctcttcccctcgacgcagtacatgctcgcctcaatcttcctcaagccgacggcggccttcgtcggcattgccctcgttggcgtcctcttgatctttccggagagcctgagccatacgtggctcagcggctactcgcgcggcgtcctcgcgacctcgctcggtctgctcgccgcgcaggacgagcttcttcacctcgcccatccgctgacggtcgacgatgccaagccgctttacacgcgcacgcgcaagctgaggaccgcgctcgtcgaaacgagccaaaagcttcaggggataacgggcctggtcggcatcgagatttcggtcggccgtgttggtccgagcgacatcaagcgactcgacggcctgatcaagacgtttgcttatcgtttcctggcgatgggcaactttgcgtctctcattctcggccggcttcagattgacgccgagcaggccgtgcagcacgatccgcacaaggacgagaagcccggcgtaaagcccctcaacgaccacacccactcggcctcgcgcttcaacgcggtcaggcgcgagatgacggccgccgaagagtcagccggccacggcctgtcgacgcttctcccgatcctcgccgaggcgtccggccctctccgccagggtctcgcccagagtctcggcgcgtgcaaggccttctacgacgacgccaacgactcgcgctggtcgttcctcccgctgctcggcaagaaggctcggaccgacctgcctgacgtcggcgcgctccgcgaggacctggcaaagcggctcgcccgctttcgcgaggtcgagcgcgggacgctcgtcgatggccctttcgcggcgtactttgctgagctcgggcgggacggtagacttcggaatggcgtcgagctcgggacgggccgaggcggcatgcacgcaagcacgcgctcactctttggctgctacgtcttcacgtgagtcactgcgccccacacctctcgtgcgggacattgtgctgatgcctcacttgctcctgctgcgcaggacctcgctcgaatcgtgcgccgagtcggccctcgacctgctcgacttgacggccaatctccagcaaaagcggacccggaaccggctctggctcccggtcgggcttggcaaagcctggcgtaaggtctttgactcggacggaagcagcaccgtcatcggtggcggtggccaggttcaggaacgggcagaggagacgcgacgggctgagaaggaggctgaggccgagatggaggacggggaagcgcaggcccaggctgctgagggcgagccagccggccgcttgcagccggtcggcgcacatcgaagccttgcgcggaacccggacgcgagtccgccgaggaccggccttcagcgggcgggcgtcaagctcggcgccgtcacgcgctggctacgctcggctgagggactcttttcgctccgctatgctgttgtctcgctctgtctttggggtaagtcgtcgcgctgcttagtgttgctcgccgctgtaattgtgagctgatcgctttccgcctcttgacagttgttgcggtgcacccggcatctgcgcgcttcaattaccaaaacagaggtatctgggcgctcattgtgcgtactcgctagactaggagaagcgacatcctgcccaggtcgctgacattgatcgtctgacggcagatggcccaaacgtcactcggcgtctatgctggcgagcagatcgcaggtttcctgctcaagatggttggcacgctcatcggcctccttctcggcattgtcgcctggtacatcggagccggtcgaggcaatggaaacccttacggcatggcggcgtcaactgtacgtcactttgaacagctctggtgctcgctcattgtgctgactgcgtgccctcgccctcgcagatggtctttaccgcgcctttcctctgggctcgcattgtcctgccgattgaggaggcggcaggctacctgatggctggcatcacaatcttgtttatcagtgcgtcctcctgacgctagtcgcctccgccggtttcgcccttgagctgacctgaggcccacccacagtcggctacagttggcaggacacgcaccttgtcgtcaccgtcaactcgggcgttggtgtaggcctcgcctggaagcgggctctgctcgtcatcatcggcttcacggctgggttcattatcatgtgctgtacgtgttgcttcccttcccggctcgaatgcacgggctgatcggccgccttggcttgcagtccctcgacttacgaccgcccgcacgctcgtccgcgaaagcgcgacgcagatcacggacgagattgccggtatctttgtcaccgaggtcgaggctctcttgcaggaggaagccgtcgcgcggtcaaacggcatgaaccacgctcacggcgacgcggccgaaaagccaaagttggccgctgcgcacaaggcgcgcaaagagcgcaacctgaagcggatcggcaagcgcgtcctggcgctcgtcgtccagatgcaggctctgcagccaagcttgacgacagcacgcttcgagccccagctccagtgcgtccttctctagtcgcagaggcaacctttgacgcctgctaattcagttgcttttccacctatagagggccatggcctagcaagctctacgaaaacttgctcgagacccagtacgtcctcttgcatgtcatcctttgtcctctcctctctgacgtcctcttacactctagatggcgcatcctcaccggtctcgccctcctctcctcgtcgcttgccaagcttgagccgcagtggtgcgcgacgctcgtgcaccactcgcccttcctcaacccggacctggtgcgtcaccccgtcatcccaacgatacgtcctggccctgacgatctgcctttccctctctcaagatcaccgacattctcgcaacactggccgtcacctcgacgagtctcttgtcgaaacggccccttccgccctcggtgcactcgcttcgcgatcgattggtctaccacgagcggacgcttctgcttggcaaggcctacctcaatcagtcgcaggctgccccgagtgagtcgtcggcctcctcggaagccgaaggcgagtcgaccctgcgctcggagcccggcactgtcgacggcgccagcctcggcatcgactttacgcccgagacggcccgcgacccgagctttgccgtgtacgcgacggccgtcgtcagcctgtcgagtattctcgtctcgtttgaccgcctgaccgacatcacgcggacgctcgttggcgagtcggccaagctgacgctgctgcgcgagtgggagggccgcggcctcgcgcttgaggaggagggccggcgccgacggcgcgctttcaacacgtccggcgggacgaggaccaagcacgactagcatcgcaactgtagcaaaggccttctctctctctcatcttgtggtccagcattgttgatctcatgtatcggttcgcactattcagagccgcgggcgtgcttgctcgccttcgggaagctgcttgctctcgggcttcttgtgtcccaggacttttttctatacagcagcattgcccgaatgccgttcgacctgctttagtcgtttgagtgaaagataggccaaggtcgatttcgagtcatgcctttctgtcgcttcggcggcgatcgccgacgccgcgggcgttcggagaacaggatcagcttgtcgcctgtccgaccgacctcgaccatctcatctctactgccttccctcctccttcagcatgctcgttcctacagcctcgcaaggcgcctcgctgcccgtgctcaacctggactgctacctgctcggaggcaacccagcaggttcgtcaattcgccgccgagctgacctcttactcgtcagctgacctcctccccgtcacctcccgcagaccgaccggccaaggccttcacccttcgagaaacgctcagggacataggcttcttctatctcgacgtttctggctacgtccgccagagcgagatggaggagatcctccaggccggccgcgacttcttcgctcggccgctcgagcaaaaggaggcgatcgctatcgacggcccggtaggcgacggcagccggggctaccagcggctgaagcagaacatcacgcagggcaaggtcgaccatcatgaaggtcttgacctctatgcgcgctctcgacagccgttcgacccggccgtcccactcagcggcgagaaccagtggccggtcaactcggccgtgctgcgcgccacggtcgagggctggcaggccaagatgtgcggcctcggcctcgccgtcatggaggccatctcggacgcgctcgagcagacacccgacgagtgggagcagctccgtgcgcagcttctcgattcattctggtcgatgcgcgtaatcggctacccaccgcttccgccagacgccgaaggcacgagctgcggcgctcactgcgactacggctgcctcaccttcctcctcgccgacaacacgaagggtgctctgcaggtcctcaagcgtaagccctggacggctggcgaaggcgatggtgactctttgagcgacgacgagtggatcacggccgacccgtgagcccgcttgctgtcggccgactcagagcagtcagacgctgaccgcctggaccttcctagattgccgtcctgcgtcgtcgtcaacatcggtgagcatgcagcgctgatctcactcgtgtcgaccgtcctgactccccttacgcatgccctcctcaggcgagatggtcgaggtctggtcggccggtctcttcaaggcgacgcttcaccgcgtcatgcacctgtcgccgacgtaccgcgtctcggtccctgtcttcttcgagcccgccttcgacgcagaggtcgcacccttacctgcggccgagcggcttctcaagagggagggccgaccggtcaagccgtatccttccacgctctacggcgagcacctgctgcgaaaggtcggcagcaactttgtcggcgagaagaagaagtattgaggtcggccctgagcagggagatcgaatggcatgaaccaggagtacgagattacaacggggacccaggagacagagagggtagggcgataggagtctagaagggggaggagaagaggacgacggctacacccgcttacggcagatgtcgcggcaaatactcttgcagatgctgccgagcgccttacggctctcccagagcggtaggccggtgatgatgatgctggcgaccagacaccatgcgatggcgactgagacccaaacggtaaagcccttgacgccgaagatgtggcccgagccaacgagcggcatcggaatgaggaggatgaggactgagaagagagtgatcgagctccaggcagcgaagcggaaggctttgttgagtccgacaaagtcgatctcgggccgctcgacggcgaggtcgtccagatcacgggcgacgaccgagtttgagggcagagccttctcctggccgaaatctttgtccgtctcgtcgaggtcgggcgtgaccggcgtctcgggctcgcgcgtgaccgaggttgagtgctcggcgttgagcgcgcgggtcgcttcaaagtcgaagttctcgggccagatgagcgaaccgacgacggtaacgagcgcgccgacgccgatggccgtcacgttgccggcaagcatgctgaagtcgcggccggtcgaggcgatggtcacctcgccgtagagcgaagcagcggtggccagccaagcggtcacgccgaggacgaggccgccgatggcgccgccgatagacgcccacttgttggccttgctccagcaggtcgcaccggcgatgggaacgacgcaggatccgatctggtgaatggtggcagacgtcagtcttcatcgatcgagcgacaaagtgagagaggacgacgcaccaagcagcccatcagctcgtagaggtagcccatcgataggccgatcttccaaaagacggtgccagagatggcggcgacaacggcgaagatgatgacggaggcctgcgaggcgcgaagcatctgctggtcggtcgccttcggcttcgcgtatcgcttgtagcagtcgttcgagaggaccgcggcggcggcaacgagttcggcgctcgtggccgacgtaacggcgaggaaaagcatgaggagcatggcaactgaggatgcgagcggagatcagcatagtgcataagggaacgagcgaagggctcgggcgacgcactagctccactggaaccgagcagagcggcagcagccttgggagcaggaagtccggccgagacctcagcggcggtaatcgtgacgttgagcgcacgagctccgaggccgagactaggcgggaagaggcatctctgtcagacaacgtggctgtttgaaacggctgcaggccataatgcacccaccacgtggccagacagaatgggatgcagaaccagcagaggccgccgatgaggtaggcctgagcacgtgcggcgcggtcagcaggagtacgtctcgactggagatcttgacgacggccgcaccttgacagcggtctggggcgtcgaagcgatggctctctgcgacaagtacaacagtcggaagtcagggagcgctcgggacagtatcgggcatcgacagctgccgcacctgccagtaagctgacacaaaacggtgaaaggaggaagcgggttagggtccgtatgcggaggtacagagcaagcgatcggagaagacacaccttggtcggcactaatcaaggcaaggagtgaaggcgggtcacggtcagcaggccgcgatcgtagggggagacggagcggagaaggatgccgaaaacatacaagacagtctgtagaccaagaggaagttgtcggcatcagctttcccatccgatctggctgtcctaaggcctacactcacgccaaagttgcctatattacggtcggagtggaaggaggcggcatcgcagattgaggttgtcaactgggcagtccatgagagctactacccagctcgaagacagctgacgtaccgatgatgttgagcactccaaagataccgccccccatcgagcgcatcgtgaggtacgagccgccggcgttgccctcgaccgggtggaggacggccgcctcttgaaggagctcgtacatgcgcgttgggctgccaatcttgtctgacgtggcgtaggcggtgaagctgaaaaggaggatgagcacgtaaagtacgacggtgtgactgtagtcggcgaagagggaagcgcgcactgtagggcacgggaggatggtgagtcagtcccaactcgaccgaccgcgatggatgacgctgcgcactgccgccgaccgagacgtagacggcgactgtcatcgggatgagccagcaggcggcgaccgtcgacatgccggtcagactagcgaccgtcgcactgccgccgaggacgagcatctaattgagcagttgcagacatgtcaggcgatgatgtaggcctgagtatagccaagcggacgcaccgtcgagacgacgatgttggcgatgaggccgaagacgaggaacgtcatgtgggcaaaggtgccccagcggcagccgatgatctcgatgtaggtggcggcgccgggagcgttcaacttgagcttgcacgcgagcatgctgaaacaaagagaggcgatggtcagcagcgagcgcgtgtcgggagagcaggcggtcgaaaaagacgcacccaaagagcaggacctggacgcaagcgcccgaggcgtaccaccaggagcccgagatgcccatcttgtacgtgatcgcagacgattggagcagcgtcgccgcccacgaccaggccgagacgatgccgcaggcgatgagtcccggcttaacgctgtgcgaggccgagttgaactcctctgcgttctttggactcgagtcggagtagcgagcttggacccaggtgatgccaaccattgctacactgaatccaagaccgaggccgacgacgatgcctgagagacgaagcagggagcatgcttgtcagctgagctctagctcgtgtgaaccaaaggtgacgagcgtaccgtagccggctgcttgaccgaggacgggagcttcgctcatgataaagctgtgtaaggtagagcgtgaaagagggtgggaggagatgagagccggggaacgcaggcaagatcagctcttccgttgttgcttgcttccttatgaggaaccgacgacgagattccgggcaaagtaagagggacggagattgtgcagactataaccaattcagtacgatctaaggttgcgggaagcattagcagctgttaggcgagttcggttcaggcgatgcggacgagctgggctggggtgagctccagaatgggtgacatgcaagctcgcatgacgagcgtcacacgagctctcaggcgaccggcgcaggcagccgtcagcatggccaagggtgttccctcctggcgctagtccagatatctcttgccgacgatatgagctcctcgcttcgataagccttcagctatcagccgacggtgcggctgaactttgccggtcggccgcccagcccgacaggcccgatccgccgcttcgagtcaagctctggtatgcagccaagccggcaagaggtcgtcaacggcagctagggtgccgaggtcgctcagtaaggggaagcagagagacagtcgacgtcagaaggcagcgggcggtttagccctcgccgaccgacggccaactcgggcgagcgagctccactgacggtctcgcgcgaagcgcatctgcattgctggttacccggcacacaagtcgacccagcatgaatgaggcaggtcaagggcgtcacaacagggtcattgtagaagggcgaagaagagagaagggaaggccggaaagactcctgggctctcgtggaaggcaaacgaccagcgctgcctgccagaaggtcccaaaagaggcgcctcggttttcccgacccttctcgacccgccgggaacgcgccgagcgcacgaacagagcctgatcaacaggccgagcaacgagcgtcttggcggggcgtgtgtgtgtgttgtaggaaagaagggaggggaggggttccgcggacagaggacaagggcagagccgggaacaggaacgacgtgagagaccggaaggaaggaaagatgtcgagcgcgagagggagattggccggatggaaagaatgttggtgggacccccttcgagggtggtcgatccgaagggctggcgggcgggcctaatggtaccgctggagggccttgaggtacgtcttgccagagttggtcaggccgccgttgcgccacatcggcctgcgcaggcgtcaaccgagcagccgtcagcaaaacggccttgcagatgggcagcgtgtgcaaaaaaaagaagaggcgcaccagacctcgccaaggccgtagccgttcgagaacgcataggcggcgacgcggtcgtcgccctcaaagacgtcgacaatgtccatgatgaactggtcgatctggccctggttcgtgcatgggatgaagtcggacgagtcgtcgacacagctgcaaggcaggcgcgcagatcgtcgtcgtcagtcgctagcccgttcgacaagcgagaccgcaagagggacgcacgcaaactccgagacccagagcgggcgctggtacttgttgtaatagtagtcgatcgaggcccgaacgccagccatgttgttcttgttgatgtgaatgttggtgatgtcccacggccggtcaatcatctttgagaagggctcgagccacgtctcgtgcatttgctctgagcgagcggcgggagtcgggtcagcggcaagcgagcgggggggcaggaggaggaagggtgacgcactgcacatcgagggcgagccgaggagggcgccgcggttgccgtgcgggacgacgagctcgttccagagctttgccgccgcctgctgggacatgtctgcgctcccgctcccggccttacagtcgggctcctcaaagccgagaacgtactcgggctgccagctcatcgaccggaagtcggaaaggcgcgaggcatcggtcccgtcggccgatccgccaccccagatcatcgagacggcggtgacgccgttggcggcgtgaccggaggggttcggcgtccagtcgtaccaccagccgatgtgcgacttgaagtggtcgaacgagtcgccggcagagatgccggctgtgggcgaaaggagggagcgcagcaggtcgtcagccaccggacggacggagcgcaggcgagcagaaagggaaggggaccgaacccttgttgccgttcggcgtaaagttggtgttggcgccggacgaggccttggtcgtggccgcggcggcggcagacgactgtggagtggatgtaaggggccaagcaatcaaagggaaggaggggcgggcgggaaaagtcagccacgaacgagcgcgcggccgggcgcagagaagagaacaacgcacgctcgttgtggtcggcgcgacccaggcggccgaggttgacgccggaggggcagcggccgacgtcttgggcttgtcgtcggccggcgggggagctacgatcgacgaggcggcggcggcaacggccgagacgatggagacgacgggcgaggcgacggcgccgacgaccgaagacgcgacggccgcgagctgggacgaagccgggctcgcaacgacgggctttgcagccgagggtgcggcgggcgccgctgcctgagaggaagccgggcgaatcttgcaggtcgagccgtcggaccgcttgcgcatcgcgatcgttccgggaagctggcggccatgggcgtcgcggacctcgacggcggcggcggggacgagggcggcggcgtggcggcgcgaggcggccgagccgaagcggcgctggtggtgagcagcggccgagcggccgttggcgtggcccgagtgggcgtcagcgggcgcggccgagtacgaggcaagcgcgaggagcgagacgaaggaggtctggatgagcatcgtgagaggggtgttggccgatgaagaggaggagcgaggaaggcgacgagcgagtgggcgagtggtgcttgaggcggagaagggggcggtcttgagggagggagggttttttcttcttgtcgaggacgggtccagcctgtgcttcgagaaagagagagtaccgctttggttgcttgaggcgagaagaggagaagggaatggtcggagggaagggagcgaagggacgcgcgcgagacaaaaggacaggcgcgcgcgcgtgcacgagggccaaagcgacataacttagggttagtgggcccgttttctccgagactgcttagggttagcgggcccggaggtcgccaagaggtatgatcgcgaggtcgtgcttgcacgtcctccaaggctttctggaaggctgccgagtacacgaaggttctccaacatccatgcgagcactactactggccgcgagctgcgagaaagaggccgtgcggacggcactctgctcagaccgccttaagagcagcttccgcacgacgcaagctcccttggcttgctcagccgacgcaggcagcaggatcaggtcgactttcatcgtcgtcaagagagtgtcaggtgctctcgtcgaggggcgcgtcgtcggtcgtgtgcccgactcgagatctgcatccggcaggccgttgtcgaccattcgccgcagctgacccgatctggagactggcgcgatgacgtcgggagatggctctagaccgtatataaacggccggacagacgacgatcgttccaacccatcactaccctcacctcaactcgcagaacaacaccctctccaacaccctactctttaccttcagaatgactggacagtacgtcgccctcactcctgccttgtcagccctttgatccgattcgtttctcgtcgctgacgtcttgcttccgccccgtctcactcgcagcgactctaccgctaagccgtccatcggcgacaagctcaagggcgaggccgagcgcatggttggcaaggccaagggcgacccccaggctgtcgctcatggcactgcccttaaaggacacgaggacaaggtgcgtgcgggtctcgttgcaatttgccatcgccatccctcgtccttgctcaccttctcccgacctgcctgtcccccaggccgaggctgtcctccggaccggcaacaccgattcttcagccgccgccaaggatattcgcaaggaggagaaacatgctgctggccaccacctgccgggccaccacgccgagcacgagcacgccgtcgctcaggccggtcgcccggtcgttgcccctggcgcccagtcgaccccggccgtcgggcacgacgccgccattggccgcgccgccatcaactgagcgaagctcggttgtcctctacgcttggcaggactgtatcacctatgacgactttccagaatgcggcaggtcggatgaggagcgggcaagaggttcattagcatcagatggtcgtgaggaggatcgtaaagggtacaggtgcagggcaagcgaaggagagagaaatgcagggcggagagaagtctcgtcgagcttcgaccgcattgctattcggcaaggaggccgacgacgccgtcggcgagctcaaacgcgccttcatgcgcctcgagcacaccgaccgccagctgctcgccttcatccgccgcctctaccccgccgccgccgtcgtggtcgtacgcctcgtgtccgccgtcgtccaggcccgcaagctcgtggccttcgtcgccctcgagcgcgccatgctccgcctcctcctcgtgcggctcaagctcccccccgtgcatctgcgccggatcgtcctcgtcgaggacgacctcctcgagcgacgggtcgtaaggttgcccgccggcgaggatatgcgcgaggtagtcgagccgctcttggaaggtcgaggcgtgggtgtaagacgcggcgtagaggtagttttcctgaggccgtgagcagaggtcagaggcgggaggtgtcagtcgagcaggaccctttgacgggcgatgagcgagacgcacctcgaaccgctgaaggacgacgacgatgtcccggtcggtcagattccagccctcggagagcatgtcggtccaaagcagtgactttgccgccggcctcggatcaaccccggccgagctacccccggcgccactctcacgcagcgccagcgccgcttcgcttacgagcgcatgcgccgcctctgcctcggccgtcagcccgaccggatcgctcccgctaaagacggacacggcagcggcggctgtcgccgcgtgcgtgttgtcgccgccggcgataaagggcggcgcggcagcgacggcggctgcggtcggcgtgaacgagaaggcttctagcgcagggtcgacgtaggccgccgtcgtcgtcgaagaggagcccgtggcgccgtaagggccgtcagcgtagcgcatgcgcttgtatggccgggcggggtcgaggtcggacgttgaggaggacgctcggcggtagcctgagccaccgtcgccggtcaaatagtatgagccggattgcagaggatgatggtgatgcagcgactcggagccctaacatggggcaaacgtgaccaaatcgtcagctcgtgggcatcaagcgaaaagacgatcctaagaaggccgaacgtcgctttggctgccggccccatcgtcgagcccgccaccgtggtcggcgacctgaagcggcttattgaccgaagcgacgaccgtcaggagctcgccgttgatcacgtccatctctgcaaagtacggccagccgccaaagaccgaggtgtaggccgggtgttcctgcgatcgggagcacaagacaagacggccgtcaacatggggatcggcgagtgagaggcggatcggacgggaccttgagaaactggcgccgggtgccctcgtcgacggccggccgctggttgtgctcgtcccaagcgaactgcgtccggagctgcttgacgcggacgtactcgcgcttaagctgcaggatcagaagcgcgccggtcagacggggttagaggatcgacggttaagccagagcgtcagtggacgcacgcgtgagtaggcactccggcactcttcggcgcccttgacgtcgccacccgagcggagctctgagcctgccagcgcttcggctacggcgttccatgcgctgatggtgaaaccgccgcctatcaggcgatgaaacgagagaaatatcagcatcagagacgaggagccgcggaagcgaggggggacggaccggcctggtggccaagcgcgcgctgctcgatgagcgtctggacgacgagcagcttgtcttcgaccggccacttgcagcgcgacttgtaggcacgccggccggtcgccggccgctgctgctgctgctgttgctgttgctgctgctgctgctggccggagccgtcgtcgatctgatggacggccgtcgcaaagtcatggtgaaggtgctgcggctgctgaaggtcggccgtgccgtgaccgaggccgtcatggtggaggtgaagatgctcctgagggagcccatacagctgctgatgctgctggtgatggtggtgctgctgctggaggaggagctgtgcgtgctgctgctgctccgagtcgagctcctggtcgagctgcccctgctcctgctgttgcgggtcgagcccgagcgcgtcgtcggccgccggcatctgaagcgacgggtcgacgccgtcgtcattggtgtgcgcatggccgtcgaggctcgggtcgaggtggtggtcgccgtcgtcgccgtccggcggctggaggctgtagaggtccatcgtcgaaaggggttcagaagggggtcgacgacggggggtccagatggggtccgagcgaaaacgggtcgggcgacggcggcggcggcggcggcgggcgcagaaacaccagcgcggcggaggcagcagaaaggcgaccttcttatccactcgggcctgccagtcaagtcgtatgatacaacgtcggacgatcgagagcgagacggaatgggcaggcgcagagacgcggtgaggatgggagcagaagaggagcaggagatgaagggtcgcgagaagagagggggcgtaagtagcgtcgagaagaagggaggaaggaggtgcatgcgagccggaagagctaaggatggaagagctaaggattggggtaggatgctgcactctagttggggagggggtatcgagctttcaagagcctgccggccagggtaggaaagcatgtgtttgaggaggggctgggtttttgcgaagcttgtgcgggcggagaaacagtccagattaggtgtttaaaaaaagggggggggagagcgagttgcctgcgtgatgcggtgaggagaagggggggggagggagggcgtctacggcagcgaaggggcgtcacctcgcgcgccgatcagggcaacattcttgggtccgggggccgcagtcgcaaacgcccggcgggcgagggttgagtaggcccgggcggtcttggcagcaggaccgacagggaggtacgagcgctcgatccggttcttctgctcaaaggtcgcgatcgcgcgctcgacctccttgacgtcgtggacgccgtaccagaagaggctcttgccggcccgcgtaaacgagccgtcggcccggtcaaagtgccaggcccggttctcgtcgtccgacttggccgtccagaagagcttgcggtggtcctttttgatggcggtaaagacgttgtcgacgaccgagttgaggacgccgttgcgggtcgcgaggaacttggtcatgacggggatctcgccctccgggtgggcgacgacggcgacgacgtcaaacgtctcgtcaccgtagatcgtgtggggcgtctgcttaagggcggagaactcctgggcgaccgaggtccggcccgagaggacggccgggtcaagctgggcaaagacgttgcggagcttgtcagcgccaatcgtctcgaccgacgaggccttgtagagcttgtagccccgacggatgagcgtgcccgcgcccgagtcggtaaagagctccttctggatgttgtcggcagagatgatggcgaccgaggacgaccggggcaggtagtcgagcaggtccttgatctcgcgaagcttcagcttggtgccgtagcggacccaagactccttcatcagggcctcgtactcctttgtagggggcggacaaggagagccggtcagtctcgaggactgcgacccaggggcagacgcagagtccagggacggacctcgtcgaggttgatgacgtcgagcttctcgccggtgacgccgtggaagaggccacccttctcgttgatgtagaggaccttcatcggctcgagcacctttgcgagctcaccggcggcaacgtcggcgttgacgttgagcagctggccgtcctcggtctcggcgagcgacgtcaggatcggcagcgcgccggcccggatcgcagcctcgatcggggccttgtcgacagagacaatcttgccgacgagaccgtatttggccttgtcgaggtactcggccgtgaagacgccggtcgggaccggtcgggcacgggtgccgagctcctcgagcgcggtgacaagctttagattctcctcgaggaagacgcgctgtcgaaggcagcagaggagtcagcgtcgagaatacgagcgtcagacgacgagcagaacgtacgcgagcaatcttgagcgtcttggcgtctgtgtcgcggaggatagctggtcagtcgggcgcaagacgtgacttgagcgctggggtgggcataccagtgatccggataccgtcctcgtagtcggggacgacgccctcctgctcgaggatctcgttcctaagaggccagccgcgggtcagtattccaagcacgctgagggagcctgacgtcgtgagcgcgaagaacgtacagctgcgggccagcgccgtgcaggacgatggggaagaggccgagccggttgaggaacgagagcgagagggcgaggtcgttgagctcgttcgtgaggatggcgccgccaatcctgagaggcaggggtgatgatagaaatgtcaggtccgaacggcgagagataggggaagcggcgcgcggagggcagtgagtcagagcccgtcagggcgaacgagccaaggggaacctgtccgcttgccgccgaccctttcaacacctccccctctttccccccttcgcaggatcccgagaacacgagccagctagctcagagctcgcgagacgtacttgaggacggcaaacttggcctgggggaggacgcccgagttggagccggcggcgccgccggttgagctcgtaaagatgcggaggtagcgctcgacctcgttgcgggtgccgagcgagtggagcaggcggaggatcgtctcgcggtccatctttgcgacgtccgagacggacgagagcccgcgctggcggagggccgggccgacctggctggccgagagcgagagggcaatctcggcttggctcggtttgagccgcttggggacagtcgccgacgcgagcgaggtcagcgcccggcgcggggcggccgacgatgacgacgcggcgacgcggcgagcggcggcaaaggaggccatggtgttgcgggtggtggtggtggttgcggtgaggaggacgagatgggaaggggttcgagagggttgtcgtcaaggcaagcaagaggtcacagtctgcccttgcgctcgtgctcgctgatacggccaggaagcccagatcggggaagccatcgggggactgaccgccgcgcaggcgacctcgacctccgcccttgacgacctcgagctacaactcactcacccacctcgcacctcatgttcatcgtttcggacctccttagtctactgccgtcatcaggcaccttgcaggcgccgccgcaggtcggctcgcctgcgccgaaggacccaaaggggaggatcgcatggccgctgacggtctgtcgcaccctccctcgacctccggccatcccgagcggcatcgctgatcccgtcagacccacccccatcctcacagcccgcccggccgatcgtcgtcttcttcccgcggcacgtcggctgcccttttgccgagcgcgacatccgccagctcgtccacctcgtcctcgccaaaccagcgcgcttcgtcctgtctacctcatcagccgccgacggtgagccggcacgcaagctccaattcctcattgccccgcacaccgacgtctccaacgcccgcgagtggttcgccgccgtcctccacgcggcctacgagtcgttcgagccgagcggcgccgccgctgacgacgagtccgcagcaggcggcgcaaagcccgacgccagcctcatccaggagcactttgccctcttcccagacggcgccgaccggcctctcgcaaaggcctttggagtcggctcgctcggctcgttcggcaccctcttttcgtcggccgtctttggcgcggtcggcaagcttaaggccgagcaggggattgtcaaccgctcgacgggcggagggagcgaccgctgggcgacgcacggcgcgttcgccgtcgatgagggaggcgtcgtccggtctgcttgggtcgccgaaacggccgaggaggagggtgacttcgaagcctgcgtcgcttcgcttggcgtctagatcggatgcgcctcttaatctccgtgcgcgggccgattgagcgtcagcagagtttcgcccagtgcaggcctgagaggtggggcctatctgtcagcctgtcagctcgccaccttgttcggcagtcgcctaaaagtcagaagagcgggaggtcaggcttccagtcggtcgggaaccgctgcgcgcgagaactcgccaacctcgcctcgaacgtcgaccttgcccggctgccttgactcgccttcgaccgtcctacccgccagcttgcgtcgatcaggatgggcgtcacttccacaggtgtgctcggtcgtcagaagctgtcatcctgcgtgagctgacgaccctggcgttgctcgcagccgaccgccccgacaagagctaccgcaaggcgaagtctgaaggtcggtcgacgctcgctctgttccgaagcctctttcgtccgctgaccttgcctcgcgtcggatgcgcaggctaccgtgcgcgctcggccttcaagctgctgcatcttgccgaggagttcccgctgtttgccggggtgcgtaacgcggtcgacctctgtgcggcgccgggcagctggagccaggtcctgctaaaggagctcaagtgagcgtcggtcgccttgctcctccgagtctgaccctctgctgatcctagggtcctcgcccctggacaaatcttgctaactcagcaaagacagttcgcagacgcctgccaagatcgttgcagtcgacctccaaccgatggcgccgctgccgggcgtcacctcgatcctcggcgacatcacctcggtcgcgacggccaacagaattatcggcgcgacagagggctgcaaggccgagctcgtcatctgcgacggcgcgcccgacgtcactggcctccaccagctcgacggctacctccaggcccagctgttgctcgccgccttctccatcacggtccacctcctcgcgcccggcgggtcgttcgtcgcaaagatcttccgaacggccgaggattcgagggcggagctgctcgtctcgcagatgcggtgcttctttcctgagcgcgatgatgaccaaggcggggtctggatcaggaaaccccggagttcgcgcgagggcagcggaggtgcgcttcgcccgacaaactagtcgaccctccccgtcaacgactgacgctcacgggtctctggctcgcaacagaggccttcatcgtctgccgcaacttcctgccgccagcgggactcgccctctcgaccgcggcgctcgcatctggctcggcgggcgactcgctcctcgacgccttcaagcactttgccgccccgccggccggggaagcaagcacgccggccggccgttcgacgagcgtcgagcaggttatgggctgggtcggctcgggtgatctatcgtcagtctgcagctcattgctgtgatatgtgctccgcgtggttgctgaccccctttcttttccttccctccgagcagggcctgggacgactaaggagcggtgcgtgacatcatcgccgccgctcgacgcgcacctctgccagatcttgcgagacgtgcctgtctagtcagcgaccgctcaggtacgccgagcgcaggcacgagtttagacagccacgccgtgcgactggtcctcaggcgacagccgactcgcagcagcacttgcgatgctggctcgcagaccgcccggcctttagtcgttgcagcaggcctactgcatgagcgtcagttcaggcatgcaataaaccatgaccatctcgtcgctggccctgtagagtccgggcgccaatgtgctggtgccgagacgtacgggtcgaagggggtcaagaacaacgacgcgcctgcgcgcgagccctcctcctcaccttcccccccccctcgatggccgccatcttctcttccctccgactcctacctcgcttccagcctcgtctctacctcggccggctcaatctctctccgaccatgcccccccggaagcgcaaagtctcgtcgagcacgacgtccgagacgtcagaggcggcggcgcagctcgaagaggcctcgatgagcggcctgaacggcggcaggagcagcagcagcagcacggctaaacggacgaaagcggcgcccaaggcaaaggcgcccaagaaggcaaaggccgtgcgtgctagggattcaagccgaccgccttcaggttcggcgggctgacttggctgctctgggtcgggcgatggtggactgctcggcaggaggcgaccccattcccttgcccttcgaccgagccgacgtaccctgaggtcgcctacaccaacaaggcgctcccagagagctacacgctgccggcaaaggtgcgtcagcgggtttccgcaagggttcaggctaccggcaagcccactgcgccccctgccctttgatgggcgtctttgctgacacccgacgcgccttcgcccggatccaatgcgtcgtcaggtcggcaacatcaaggtgagctccgccgtgcctacagctcaaagtcttgctgtccgattagctgacctgcctatgacgaatgtgacaacgctagatctctgcatggaacatcacatctctaaagtgagcccgcgcagcccccctgctgcctcagcccctgcttgactaccgaagctgatccgtctctcctgacccgtgtgcatcgcaggtcggcctgcgagccgaaacacggctcgggctttatgggctacatggaacaggaggacgccgacattctcgtcctaaccgagacgaagcgcaacgacctgtcgccgatcccccaggacccggcgctcaagaagaagtacccgttccagaagtgggcgatgagctcgaccaagggctacgccgggacggccatcctcagcaaggtcgagcccttgaccaagtcaatcaacctgacggtcaagggcgaggtcatcaccggccggctcgtctgcctcgagtacccgagcctcttcctgatcgggacgtatgcgcccaacgcgtcggacaagctcaagaacatccagggcaagatcgactggaacgacgcgtttgagaccaagctccgcgagctcgatgcgagaaaacccgtcgtttggggcggcgatatcaatgtcgtcgcgaccggccgcgacatctccgatccagagaagggttggaacaagctccctggctggaccgagcagggtttgtgcgctgcgtctctgactgtcctgccttttgaagctgaccgcttcgactcactcgttgcggcaatcccgcagaggtcgctggctacaacgcacagctgaatccggcacccgagtcaggccacaagccgctcgtcgatgcctggcgggcacttaagggccccgacctcgtcgagtactcattccgtccgtctgatcatcctcccaccgttgctcgcgagccttgctgctctcactgctgacgagctcgatgatttcaacttgcggcagactcaaagcgcgtcctccagcgagagaagggcaaaggttggcggctcgacacgtttgtcgtctcggagcggctcctcccgcgcgtcgtcgcctgcgagatccggtgcgtgccctccagcccagcctaggcgctcaaggccccgactgattgagtagctgactgccgtttcgccgtcgcttgcaggcgcgagatctttggcccaagcgaccacgtgcccgtcgtgctcgagctctctggcgatctctaggccgacctcgttacctgcccgttctcggcctcccttgcgcgtggcaaccccgaacgagacgtggtcgccagcatactcgcgtggcgtcgctctcaatgatctgtctgctgccgcatcagccctcgcctcgagacagcagtcgtgattgtgaaggaaaggcgggtgaaggcattcgagaagaagaggaccctccatgcgtcgcccgggtccgccgccctgagcggccccctctcgcctcgcgagcaccgtggccgctgccgctgcccgtctaaccctggtggtgctggtagtcgacgacaccaaactggcgggcgagccggccgcgaatcgacatgtcggtcggcaagtactggtcgtacggcatgctgacgggccggtcaagcttgcgatcggccggctcgaggtcggccgcctgaccggtgccctcaacgacgatctcgccgatccggagccgagtgtagcggagcttggaccggatctccttcttgtagcccttgcggcgcttcttgaggtgcttgaacgtcatgggcgacgtcgtgtgctcgaggacggtcgcctcgaccttgacgcctgtcaggcgcgagcccttggccgccttgagcgcgaagtcatgcgtgccgacctcaaagacgcgggtgagggcgagcttggtgcctggccggaccatcggcttgagctgggggaccgttaggacgtcctttgcgtgcaggaggtagcgccgctggtaaagcgacatctgtatgtacttttgcggctgcgatttgaggagcgcgaccgctcgcgctgacggcgtcgacggcgagctgggggaggaggcgcccgagtagaggagcgactcggccgtcggccaaagtgtcggtgtcggtgctggaccaggcggcatcgaccgcgagcgcgaccgaggtgcggcaacagcgctgctgctgctggtcgacgaggaggaagctgagctcggctcctccgtcgtcgtcgtcgtcgtcgtcgtcatcgggagcgggtcgagcgggagcgtctcgtgcagggctggagtcggcgtcgtcgagagcgacctcctcgggacagctgccgggaggactatgagggcaatgaggagctgctgatcagtcgaggagggacatgccgtgcgcacgcaatcggcgaggacgcacgtctggaggaggaggaggcggccgacgaggtcgaggcggcgagcgagcgccggacagaggcgaacatcagaggcggcggcggcgacgagctgggtctggcgagttgaggtgtgcgtgcgagtgagtcgttcagcagccagcagcagctggtcgagctcggagggacggcgggcgtggtcggccggggcgctctgccgtctaagccgatcgattcatctaacaatttcaagtatgctcttttccgcccctcgccgctcctcgcccgcccgccctgcctgccggcacgggcgcgagacgagttgtccccttccgccttccctctccttcacccctctcaccccccttctcttccaaagatgctcaagaacatccccaaggtcgccgtgcgtccctactccagctggccttcgcatgcacgtaggcgtgctcggctaggacagactggcgcgcgtgctcggagttcttgttgccacgggagggctgaccatcgcctcttccgatctcccttcgcccggccctttgctgcctgcctcgcgtcctctgcctgcctgcgctggcttgcccgatccagctccgctcccgcttcgcggctgcccctgcttcggcccggacttacgccgccgccaagcccggtgcgtcctccttctcgttgggctcgaccaggcagggccagcacctcgcgcgcggcggcggcgctctcgcctttttcgcgccgccttgcccgcctggctcgggccgcgcttccatcccatcgcagcagcaactgaccgccttcctgccttctctccctcgctttgctatcgccctccgtctcatctcgtcatcgtgctgccgctgtcgccgccgctgctttcggcttcgctcggatgggctgctctcggcttgtcctcgctcttaacgtctcctgactgacagccgcctcggaggtctcctcgatcctcgagggacggatcgccggctcgtcgaccggaggtgacgtccaggagactggccgtgtccttagtgcgttcctttcttctcgcgcgggccttttcctttgccgtcctatctccctggcccagcgggcttcaagagctccctcgcgctgacccttcctgctcgctttcgcttttctctacagccatcggtgacggtattgcccgtgtctacggcctgcgcaacgtccagtccggtgcgtccttgcttctcgccgactgacttgaaagacggtctcgctgacccgctcgacccttttctttttttctctctcttctctcctgccgttttctctcttcttcatctctctcgcaacctgcagaggagatggttgagttcgcttccggcgttcgcggcatgtgcctgaacctcgaggccgacaacgtgtgcgttcatcatcgacggttggctctcttctggctagttgcggcgctgacgctcttttctcttcgctgctctttctcagcggtgtctcgatcttcggatcggaccgtctcatcaaggagggtgacaccgtcaagcggactggcgagattgtcggtgcgtcgccgaccgtcgtcgccccttggtcttttccacgcgcccgacgagccgtcgctgaccgcccctcttctccttccagatgtccccgtcggccccgagctcctcggccgagtcgtcgacgccctcggcaaccccatcgacggcaagggcgagatcaagacgtcgctccgctcgcgtgcgtcgctcaaggcccccggcattctcccccggacctctgtcaaccagccgatgcagaccggcatcaagcccatcgacgccatggtccccatcggccgtggccagcgtgagctcatcattggtgaccgtcagaccggcaagaccgccgtcgccatcgacaccatcctcaaccagaagcggtggaacgacggccaggacgagtccaagaagctcgtgcgtggccttcctcgcttcagagcggcaagtatcgtcagtcgctgatctggccctccttcctccctctccagtactgtgtctacgtcgccgtcggccagaagcggtcgaccgtcgcccagctcgtccagaccctcgaggagaacgacgccatgaagtacacgtgcgttcgctcgccctgctcctccccctcgtttgacgcccgccagactgacgccctgtttccgcttgcgactccagcatcgtcgtcgccgccaccgcctcggaggctgccccgctccagtacctcgctcccttctcgggttgcgccatgggcgagtggttccgtgacaacggcaagcacgcctgcatcatctacgacgacctgtccaagcaggctgttgcctaccgtcagatgtcgctgctcctccgccggccgcccggtcgtgaggcctacccgggagacgtcttctacctccactcgcgtctcctcgagcgtgccgctaagatgtcggacaagttcggcggcggatcgctcaccgccctccccgtcatcgagacccagggtggtgacgtctcggcctacattccgaccaatgtcatctcgatcaccgacggccaggtcttcctcgaggccgagctcttcttcaagggcgtccggcccgcgatcaacgtcggtctctcggtctcgcgtgtcggctcggccgcccagaccaagatcatgaagtcggtcgccggttcgctcaagctttacctcgcccagttccgtgaggttgccgcctttgcccagttcggctcggacctcgacgcctcgacccgcttcctgctctcgcgtggaacccgtcttaccgagctcctcaagcagggccagtacaagcccatctcaaccgaggtgcgtcttcttgtttgcttttgccccttgctcactgtcgcgtcccgtagctgacccgtcatgatgatggatcatgaaggtcatggtccccctcatctacgctggtgtcaacggtctcctcgaccccctggctgtcgaggacgtcgtcccctgggacgctgccttccaggcccacctcgtcgccgagcagaaggacctgctcaaggaaattggtggcggcaagatgacccccgagctcgaggccaagatcaagaagacggtcgtcgaccacgtccagtcgttcaacgacgccaagaactaagttgttcttgactctctagatcgatcgcggccgagcgagcggaagggccaatagggtcgaacggcgtacataccgaccatgcaagaatgacggattctctcaactctttctgctctgcttaagcgctctggtcacgttgaaagcgagggcggactgttgggtgctgccttcgggaagtcgcgtgtctctgtcgtcgagtcggcgtctgctgcgccggggcagcaagcatgagccacagagacgcgagcggagcaaccgctatgcctcaacctctgcgagcgacgtttgagcactgatcgggaggctgcatacagttggtcgacttgtgaccctgacatgggaagccctcgctcgtgccgtcgtcgacaggtacagcaggaagcgggtcggaggcttcggtcggagggacgactcggcgacggccgccgcctgcctcgcctcttgctcgctgaccctttacctcgatcctgctccataccgacttctccttgcacttccttcccctctcgaaccgctgctttgctcgaatccgcccaagctacctcgctgcccgccatgtctgccgccgttgacagcctcgtcgtgccctcgccgttcgacgcccacgttcacctccgcgagggtcccgtctcggcactcgtcacgcctcacgtccggcagggcggcatggacgtcgtctatgtcatggttcgtcgctcgtactgcttgacagaaaactttgcagctcgagctcaacgttgactaaccggtccgttgccctactgctcgtctcgctcgcagcccaacctcagcccgcccatcacctcaaccgagcgggcgctctcgtacggcgcccacctccgctcactctgcgccaagaccgagtttctgctctcgctctacctccacccttcgatcacgcccgacgagatcaggctcgcggcctccaagggcgtccgcggcgtcaagagctacccccggggcgtgacgaccggttccgagggcggcatcgaggactatgagctcttctatccggtctttgccgcaatggaggagacgggcatggtcctcaacctccacggtgaggtcccgagcgaccacgacaaggtgagtaagccaccaccgccgcttgactagttcctggcgacagctgactctcacgccctcgcttatctccctctccctagggcatctgtgtcctgaacgccgaagagacgttcctcacccacctcttcaagattcacaaggccttcccgaagcttcagattgtgctcgagcacgcgacgacggccgctgcgatcgaggcggtgcgtgtcttgcgcctcctgtcgctacgcctcttccctgacgatcgctcccacccgacccaccgcaggtcaagaagtgcggcgacaccgtcgcctgcagcatcaccgcgcaccacctgcagctcgtcgtcgacgactgggctggccagccctttaacttctgcaagccggttgccaagtacccgtcggaccgggccgcgcttcgcgaggtcatcaagtcgggtgcgtctgagtcggccggcggctactcgctctgacgtcgacactcatccctgctctctccttctacaggtcacacgcgcttcttcctcggctccgactcggccccgcacccggcgctgtccaagacgacgacgtcgcccaacgtcggctgcgccgccggcgtctacacgtcctcgcacctcctcgccctctgcgccgccctgctcgactcgtttggtgcgctcgaccagctcatcggctatgtcagcaccaacggccgccgcttctacggcctgccgaccgagaacctctcgaccatcaccgtccgccggtcggcagagagcccaaaggtcgagcgctttgccgtcgaaggcggcggcgagctcgtccctttctgggagggcaagcagatcggctgggagatcagccgcgactgagcgggtccccactggggagattcaatgagcaaagaacatggatcgctgcgcgagccagctcaggccccacgcggccctgcactgctcttgacgccgacccaagcgtggagggagagcgtgccgaggtcttgcgttgcgtcttgcgtctgcgtcgcctttcgggccggcatgagcgaccgtcgtcggctgcgctttgacgaggtcgcctcgtctgggaaacggccgggcgcggcccattcgacgccttgcgccgcgagatcagcgaggaggccacgagtgatcgacttgtgcaaggaggggaaaactggcgttgaggagtatgccgagctcggggccatggctctgcggagggacgattgcggtcagccttcagccttcgacgagatgaacagcacgcattagggcatactcgatccagacgcccgtcgcggcgccgacgaagccgggcgcagcactgagctgagcgtctgaaccgaccgagtcggtaacggttgggtcgtcgcccgacggacgagtgcctgcgggcgaccggcggaaggtctggctgaagacctcgcgcgacctggacatgcccgactgcatcagcagcgacgagcggatcgtgacgtccgacagcggctggaccatgtgctggtggaggtggcggtcaaagtgcgccttgcgagaggtcggcccggtcggcgcgcttgtcgagtcggatcggccgtgctggtggatggcggatgtagccggaagccgaacgcgagagacagccgtcacagctggggtagactgccagaccggcgatggagggggcgtcgcagcgagaccgctcggcagctcgcccgacagctcgacgatctgtcggggcggccagctagaatgagcgacatattgaggcaagcgagcagtcagacgcgagactgacctcgaggatgcccgtaccccgctcgagcacgcgggtgcactcttcgagcacgtcctgccacgatctggagacaagtggtcaggccgaggcaacatgaaagctgcacatgctcggcaactcacgactcagggatgccgaggttcgcaaacgcgatacggacgacgtcgaacgagcccgtgtcgaatggtagcatctccaggctgggtattgcaagaaaaggaggtcagatcgacgctcccccgccggagactcgccggcactcacaagttgccctggacccattcgatccggcgatcgaggtcggcccagtcgaccatggcagcccgatctagcctaccagcctgccggcgggcatcagcccgctgctgctggaagcgcgcccgctcgccaaggtcggtctggccggtgctgatgtcgaagccgacaaagtacgacgtcggccactgggcggcagtcgcgatgcaccacgcgcccgagccacagccgatctgaggtaaattaggcagggtcaggcttcgcaagctcaatagagagaaaggcgggcctgaggctgacgtcgaggactcgcgccggctctggttggccatctgcgaactcgataaatgacgtcctgcctccgagaaggctccagcgaatcgactcgagcagcaggacctccatctctcgcacggcatccgagtcgcggactgcgtaggggatctgcggccgggtcggctgggagtcgagtttgctgcgcccctgggcgacggggctgccggaggtcggagcgagccgtgagaggtaggagttgtcgcggccattgcgagggccgtcagcaaagaggccaaagctcggtgcaccgagggctgaggccgttgtcccagtacgggtcgcagagccttgaccgcctcgagtcgttggcgacaggccggtgccggggctggcgacggagcgaccgacgaggctcgggttctgcgagccgaagaggggcgaccgcgtgatgggagggccagttgtaacgatcgacggcgcgacgtcgacgatgagcgacggatcccactttgagtgcggccgagcgtggaaggggagcaagtcgctgccgtggttgccgccatccttctgagctcgcggcgtcgggaggttgtccgctgaaacgggcatgccaaagtcggtggcgagaggagtcgaaggaaaggatgaggaggatgcgctgcggttgccgttgagacgagcgaaggacagctggaggaagtcgagaagagcgaggcaatccgagtgcgagaggaggaggaggaggaggaggaggaggaagaggaggaggtggaaaaggaggaggaggaagaggaggcagcggtcgaggtaggttcgaggaaggctcgaagggcgcgcgagcgagccgagctttaagcggtcgagcaaggccggccatcagcggaagagggaggcctgtcgccggcctgctcgagagggaggtcgagcaacgggtgaaggttggggggtgctgtcgctgcgaagctcgccttgacctcgaaggcgtccgaccgctttggcagaagcggcggcggaggcacgttcctgttgacagagaacgctcgtcgtccgggatcaggcatcgtgcagggcaaggtgatcgttagcagctcagctcagctctggacgcctcggtggcaggaggtcaaggcggcggcggcggccgaagaggatcgacgtcgtgaaggccggcgggctcgacaaggaaggcgtcggctgcgcaccgactcccccttcgcggcgaacaaaaggaaagagcttgcgccaccgcgatgttgcctttgccccttgctcactgtcgcgtcccgtagctgacccgtcatgatgatggatcatgaaggtcatggtccccctcatctacgctggtgtcaacggtctcctcgaccccctggctgtcgaggacgtcgtcccctgggacgctgccttccaggcccacctcgtcgccgagcagaaggacctgctcaaggaaattggtggcggcaagatgacccccgagctcgaggccaagatcaagaagacggtcgtcgaccacgtccagtcgttcaacgacgccaagaactaagttgttcttgactctctagatcgatcgcggccgagcgagcggaagggccaatagggtcgaacggcgtacataccgaccatgcaagaatgacggattctctcaactctttctgctctgcttaagcgctctggtcacgttgaaagcgagggcggactgttgggtgctgccttcgggaagtcgcgtgtctctgtcgtcgagttggcttctgctgcgccggggcagcgagcaagagctagaagtccgcctagggtccacttgcgcccgggcactggcagaaaaggcagtgcgagagtttgagagaggttggacgacgcaggtcaaggtgacagcttctcggcgagaaggggcggctccggccagtcggcctctcatgtcgcacgtcaaccggcggtaactccccctccttcgttcgtcgaaagtagcctttatgcaaacgtgcgacgtacaggcaggaaagaagagggtgttcatgagtagatgattcgagcctcgtccgatgcctctgcgctccgtcggtcctctgaccccactctcagatgcgacagctcgggtgcgtatcggcagagatgtctacgggccaatgttcttcggaaggctcgacctagaacaggcaggagagcagcaggagtcagctcttgcgtgaactcccgaggtgtctccgcggcctgagccggccaagaaagacaggcaggaacgcaccggttcatcatggcgaccttgtgccgctcgtcaaccatcttgagcacgttgctcgacccatcgagcaccgccaggagctccatcgcgatccgcttctcgccctgtcgggccgcccgcttgtcggccgccttgagtatccagcggatgccgaagcgcgtccgctggcgctcgttcagcgggatcgggacgaccatcgtctttgcgcccttgcggatcgacttgagccggcagagcggcgatgcggcgacgacggcggcgcggaagatggggagcgagggcgactcggtctgccgggcgctggaggagggggttgagggagggggtcagtcgagctcgcgctatgaagggctcaccgaggtgaggggcgggcccctccatcgctcggaaccccttgccgtggaaggctagcaagggcagcgcacggagcaagccacgagaaggaaggagcaaacggggaccaacatggcgtcgaggacctttgaaaggaagatcgtcgctttgagcttgttgccgtgcgtcattgtcaggctgacccaaaagtcgcagagcggatccgacgtctgagggatcgccgacggctggtaggggacggtcgccgacgagaagcggtcgatgtcgtctggccgggggctgtcggtgaagtcgaacgacgagagcggcgacgaagaggaggacgaggacgacgaggcatagaagtcgcgcgggccgtagagattcgcgtcgagcgccgccgaggcctgagccgagcccgagctagcggccgaagcggacgagctcgctgctgctgccgtcgacgacgaggtcgaggccgtgccggtcgagctcgagctcgagggaggccgggcgtcggtcccgagcgtggcctggaggaggtcgccagccgcgcctgaaggactagcagggccggtcgccatcgaccggcgggcggcaacggcgagcgggagtcggaaggccggccgggtgacggcgcgggcaaacgaagggaagacagacataagggctgaagggaggacggggtgagggtgaggggagcagcccaggggcgacgagctccggtcgagctggctgcgaggcggcgtgcgaaaacggcccgcgggcgagccggcaggagtcggcgagggagagggctcaacgggacaggactctctgaccgccatccctgccttcattacttctctgaccatgccgacaacgactgcaggcaataagagtgagtctccacagaactctcgtctcttctacgaaagtgaagggggcggacgacgtcggaccgaaggctgaccgccgccgccgccgctgccctcgccccttttccctggcctccctctccttctgctcgtaggcaccgacagcagcagcagcagcggcatgcccacggtcgagctgctcgacgacgagggcatggtcaccgacaaggtcggttctctctgtcaaggacccttcatgggcctgcagggctcgcgacgagacgccatgaaagccttcccgccatacctcagctcgagctgacgcctctcggcccctacacccttcccagttcctcggcgtactagcctacatcttcagcaccttctgtcatccctcccgccagccatccttcgccaccctcgaacggacagcccactttccaacttcggcgctcgacgccttcgcgaccgcgacgaacggcgagcccttctcggccgaaacgaagaccgagatcgcgacgttcttcgaccaggtcgagcgcgacgaggcgagcggcgtcgagggtggactcgactttgccgggtttgagcagatgtatacgcttcagacggagagtgaccccgaagagacgtggaagtgcgtcggcctttttgcttctattgctttccctacgctccgagtgattgaccggcctatccgcccctctccgcggccgttgctgatcttgccgtctcctactaatcagggacctcgccgctcacggctttaaccgccagctcgagctcgtccgtccggcgtcgtcctcctgagcccgtggggtcgacgacggcccgcctcgctcttcccaccgtctcgatccggtctctgcagtcagctcctggggacctcgggcggcctcgcctcactcaaggacctggcacactctccgggaggcgaccgccgaatctgaccctgcatgagcgcaagtcgagcgtctggcttgcggccgagcacccacccgacgatcggccggccggccgtcgcgcacgcagctgatcgcactcgtcatttggtgggcttttcggtcgtttgaggagagagcgagcgggtccggtgtgtgcgagaggcaagcgggcagagggaggccgtgggccgaagttacttgggccggctcgcttgagtgggtttcgggcatcgatcaaagatatttaattcccctaattgacaagacagcgtcgaggactcgacgttccgggcctcttgaagaaagggcgaagggctcgtgacccatttccttgaccgcaagaggatgagttaaggtctagcactcgaaaggtctagcactcggtcattcatacaactttctctcttgacgcgctcatgatgcgtgcgctcggtccgtcaaccctcggtccctccagcggcgcacgcttcacttggtgaacttcatcgagaccgaattgacgcagtggcgctcgtccgtagggttgtcgaagcctgaagaaccgcgcgagaaagagattgagaaagagggtaagctgctgcgcaggacgtgtgcaaggtcactgagtgagaggcagacgaaccctcgcccttgaagacgtggccgagatgactagggagaaggaaagtcgggaaaagcacagcgaggtggagcaaggggagcagacgaaggagcagcaagcgaaacaagaacagagatcgtcagctatctagcgtcttgcccacgcgcacagtgaaggaggccagcggccacgcaccctccgcatgcagtgcagacaatctccgtccgggtcgagaagagcgagcggtcctcgtgccgggtgatggcgcccgggattgcgtcgtaaaacgagggccaactgcaacacgagcgcctgcaagtcaatctttgtacagatcgcagctcccagagaagaagcgaccgacccgcagcccgacttgaacttggtcgcagccttgtagagcggcgtgccgcagccggcgcagccaaagacgccctcggacgggtagaatttgtcgtattcgcccgagccgggggcttcggtccccttctgacgaaggacgcggaactgctccctgttgagctgctcgcgtgcagaatcggaggagggcgtcagtcggaagggcaatagttcgaagaggcgaggacgacgcacctgagcctgccactcgccctcggtcttctgagctccagcgttcggcatgttattgctgccggacgaggcaaatagcggggtggtcgaaaaggcgagggtgcgtgcgatgggcgagcgaaggagtgtgcggacaaaagtcggtctggcgagcatggggtcgaggtggatggcgaaggagaagcaggtggcgacggcgatgggcggctgagctttcgatctggggttggccgcgcagcagcagcggcgtgacgcaagcctcgaagcaggcagacgacgccgacctccttcaacgaccttcattctctctcgccagccatgtcgccgttgtcctacatgtccgtcccgagagcgggagagagtcctggagtcaacaaagctgacgacaccaaacctggcccgccagcctcgccctcaactgcggcagctcgtccatcaaggcccggctctttgccttgccgtcatcgtcgtcgtcctcggccgagctcgagcaagtagcaaagctctcggcgagcgacattggtgctggcggcgacaagaaggtcgagctcgagcttaactgggccggcgcaaaggaggatgaggagccggaacggtcgtcgaagggccaggaagagctcgagtgtcggtccgctttcctcctcgctcgcttgctagctttccttgcctcttgagtcggataggatcctttcaccccccttctctcgcctaaaaggcggcggaacgctcaaggccttcccctcgagcccagcccaaggggggatcacctttggccgtcgcccgagatggctacgtccagggcaggccaggccacgcgcagctctgagcaaccttcctccatcttcccagtcgcgccgggctttgtcccctccacccttcctctcttgtcgccccagctcggccctcgactctcttcactcaagacgcagctgctgactgctctctcctcgtctttcatgctcagactccgacgtcctctcctcgctcctctcgctcctcacctcgtccgactcgcacccgattgacaagtcgtcgatcaaggtcgtcgcgcaccgcgtcgtccacggctcgacacacaccgagccaatcgttgtcacgaacggccaccgcgagggcttgggcgaaatgaaccgcctgagcacgttcgcgccgctgcatgtgcgtccggggtcgcgcgtccgcgagaaggctcaacgagcccttctccgtactgaacgtcttcctccttgtccatcgctctccagaaccataacgcggtcctcgccgtccgctcggtgctcgatctcctgcccgatcacacgagcgtcctcctctttgacacgctcttccaccagacgctcgatgagcacgtctacacgtatgcggtcggcccggccgagcaggagacgccggtgccgctgcgaaaggtgcgtcaatcgtaactcgtgccatcgcaacgatgctcagctcctgatgctctcaacgcctccatcctgccccgaaagtacggcttccacggcctgtcgtacgcctcgctcctctcctccctctcctctcacctctccctcccctccgcctctctctccgccgtcgtcgcccaccttggatccggcggctccgtctgcctcatcgccaacggcgagagcaaagacacctcgatgggcttgacgccgctagaggggctcgtcggcggctcgcggagcggcgacgttgatccgacgctcgtgtttcaccatacggaagactgtgcggagaatgcgctcgagggtgaggaaggggacgaccggttcatttcaaaggccgagatggcgctcaacaagtaggtcctgccgtacctgaccctcgaccttgagcgacggctgacggctctggcttcgtcttcctttgctaaggaagagcggcctgaaggcgctcgccgggacggccgactttgggctcatcactcatcggatggagcgctcggtcgagtgctcggatgacgattctgcacgcgcaaagctcgcttacgacggttcgtccctctttccttgtcgctcgatggcgaagaaatcacgatcctgaatcactcggcgatccctttccctgctcccagtctaccttgaccggctcctcaagttcgtctcgttttacctcttcaagctcctcgcgctgcacgccgccggcaaaggcccgtccccgcatctcatcttctcgggcggaatcggcgagcgctcggcccgcctgcggaaggacgtcgttcgctcgctgacgttcttgggcgtcgagctggacgagggcgcgaacgagagtgaggggagtgagggcgtgaagcggatcggcggggggcaggttgggaagggcgtcgagggcgtctgggtgattgagacggacgaggaaatgcagtgtgcaaagatggcggtcagtccttcccttctccctcttcgtcttctgcagcctcgccgagactgacgacctcatactcaaccccgctcttcagcgcgcgcaccttggcctctaatcaccctgcttgcagcggccgcccggactatgcatcatcctccctctcgcgcccctcttcacttccctcgctacaagtagagatttcgaccgtctcccaatgtatctccttcatgccgccgctctgagagagacttccttttcacgcccgaagccgaggcgacagtggcaccagcgaggcatacaagaggcaaacgagggaagactgaatcgagtcgagtcttggagtatcaggaagaggagcaaaaacgggaacgccatggcggacgttgacgggcgggacaaagacagcggccttccggccgtcacccgagcttgatgaatccgccaacggtcgacgagcgtttgcctgctccccagcggccgaacgcccagtcgatcggcgtcgccgtcgtcatcgcctgttgaggataccggctgctagccatcgccgctgccgaggacgcccgactgggcccggaagcggcgcgggaagacggaggaggcccgatggcactctcccaggcggcatcatcgaggtaccggttgacggcccggtcctcgacggccggcttgctgctgccggcgccggctttctccttgatcttctccgtgagcgcatcgagctcggactcgctatcggcagctgccattccagcctcggcctcaagctccgctagaccgacatacgccctcgtcacgagatcgtccgtctccttcgtcgcccgaccaaacctcacgagcgcccgttcgtgcgcgagccgcttccgatcagcctcgggcagcgacagctgatcctcgggcgaggaggacacgaggaggagcgaggcgcgcgtttggacgagatgcggcgtcgtgtggatcgtcgagggtgggagccggttgaggacgcagagctggtgaggctgcaaggtcggaacatgaagggggagattgtcagtccttgcgcggtcagttcagcccggacacgggcgctgagcggatatctaatttacatcagctccgtacttgagggcgataccgatgagcgtgtcgcctttgcggacgatgtgccggaccggccgaccgtcgacgacgagggctgcggcgtcctcatcactggcgtttggcgtctccggtcgcgactcgtcggcagcggcgacggcgtgaggcgcagcctcggtcgagtcctgctccttcccgacctcgccgtcatcttcgtcatcgtcgccgagaacaaattggccgccttcggttgtagtggtggaaaggctgccagtgctgcgcggcgccggtcggcccttggcgcagagcaggcacggatcccacctggccgccctgcccttcgtcccgcagcacgagccgcagatcggccgacgacagcatgtcgtctcgacggccttggtggcggtgttcgaaacaccggtcgtcgaggagatgtaggtggaggaggaggaaggggccgaggggacggtagaggcgcagaggaggcagagccgatcagggacgacggcaggcgcccggccggcgagcgtcgcggccgactttggcgggagcgtccgcgaagacgatgcgcttggggtaggcgccatggcaagcagacagggctaaaggcagggtcggatcgggagggagtcgtggtcgatgggtggcgaaggcggcggcgagggccgaagcttcgaaagcgaagtcggctgcgcaggcgaagtcgtcgctcctccttgctgacagcgaccaccctgacccccctctgctgctatactgcccaagatggtcgcgcccatgtctgcagacgtcccggtcgacgcgcccgaacactgccccgtgagtggttgggtcgtgccctgcgctcggccgctcgcggtcgctgactccgccgcccccgccgccgccacgcccctccacctgctctctctgctcaaccggacctctcgtctgttcaatttcgatcgtcctttgctctctcgctgggtgaaccgcctgtcagggcaccgagtcgaccgaggccggcaagagctcagcctgcgacggctgcccgaatcagtcgttctgcgcgtcggacgagcccaagctgcccgacccggatctgccgctgatccgcgagcgcttgcggtccgtcaagaagaagatcctcgtcctcagcggcaagggcggcgtcggcaagagcacgttcagctcgggcctcggctgggcactggctgccgatgaggacgttcaggtgcggtcgcggtctctccgctttacccctgcccacggccttgtgtcggcgctgaccgagcagccaccctccagacgggcctgcttgacatcgacatctgcggaccctcgctcccacacctgctcggcctgtcgggcgagacgctccacatctcgtcctcgggttggtcgcccatctacctgacgccgaacctcgcgtgcatctcgatcggcttcctcctgccgtcgacctcggccgccgtcatctggcgtgggccaaagaagaaccagctgatcaagcagtttctcaaggacgtcgactggggggacgagctcgactacctagtcgttgacacgccgccagggacgtcggacgagcacctctcggtcgtccagtacctccgcgagggcgggatcgacggcgccgtgctcgtgacgacgccgcaagaggtctcgctccaggacgtccgcaaggagctcgacttttgccgcaaggtcggcgtccgtgtcattggcgtcgtcgaaaacatggccggctttgtctgcccgagctgcaacggccggtccgacgtttttttcccatcgaccggcggcgcggctgcgctcgccgaggagggtgcgtcgtcgcaagcactcgagcggccgccggcgaatctcttctctgacgcccccttcccctctttctgactggtccagagggcatcccgttcctaggctcgatcccgcttgacccgcggatcggcaaatcgtgtgaccacggcgtctcgttcctcgaagagtaccccgagagtccgagcacaaaggcctacctcgacatcgttgccagttgcgtccctctctcgttctcctcctcgaatgggggcccccgtcactgacgcactcgcttaaacctggcttgcagaaatccggacggccgtcggcccgctctaggtcttgccgtctctcctctgtctcagccgcctccatttagatgcccccctcgaccccccttgcaatctgttgtacgccatgctcttcatccatcgcagcacaagggctacagacagggcggagggagcgctcgcgcgtcgtcatattctcgttagggttctatggtcgtgaaggcattcgggaaggcgaaggaaatggggccagcgggacaacctgctcgttcaggccgcgactgcgcgcagtagccggccgtcgccggtcctgttgccggaacccaaagcatctggaggaggcggaccgtttgccgtcgacggatagcacatgtcgatgaagccgatcggcacctgatggcgtgtcagagcggaaggcaggtcgggtcgtcagcgtcagattgccaagagacggctgtgtataaagacgcacgccgcgcatagagagccggccgctgatgaggagcatcctttggtacgtctcgtcatcctgcgtgtagacgacggcagtcgccggcgtcgatgggtggagatttgcgacagagtgctgccagactgagtcgatcgcgagcttgagctggtcgacaaagatggctttgagctcagaggcggtcatctcgcgcgggaggccagagacctggcgtggcaagcgagcaggtacggactgtcagaactgggcgagacgagggccaaaggcgtttcaaggggcaggttggcactgaccaggatggcgcgttgtgaggatgagggctggcgcagggtggaaagcgaggcgtcgatgctgatcgatgtccgtggttggagactggtctcactgacgtagatgtgagtctgcgattcggacggaagtccgaaagtcagggtcaggacggggctcgtgtgggtttcccttgtccaataaacgcacttttgcgtcaagcgcacggccgtggaggccgtggacaatcttgctgaccggaaattgcaagtcgcgtgggtagacttcgatccggatcacattctcgaggggctgaccggagtcgcgaggcgaaggcggattgaagacgtggtagcgaaagcggaagggccacttccgttcaagctccttctgcagacgcgaaggctcgatggagaagcgctgccacgatcgggccgagttgttgttgcaagacacctgcaggcggaggcgatcgctcgttgagcgtcagcacccgtctgccgagacccacctttggtgccacgacgtacggttagaagcgagccgttcggcttgccgttggacattgacaagtcgacttccgagtggtgggcagtcctatcgatgagctcgccggcgccggcatagtcggaccagtagaagagttccgactgggcgcccaaggaggcttcggccgtcagtcacatattgcgcccgctgcaagctaggagggacctaccccgtgggacgtgccctttgtgagggcgagcagcttctgtacgtcgaaggcagagtggcagaggatgcggcccttcaggccctcgaggtcgagctccatggcactgacgaggacgccggaccctcggagctgggtcactagaaattctgttgtcctcgacatctctgggaggttcttgacctgtgtcaagcgccaggtggtcggtcagcgcgaccctggaccagtcttgggctggacgatgactcgtacgtggaccaggagggccggatcggaccgcgcgatgagctttgcgccatcttggtcgttgggcagagacggccagacgaccatctccgggctcgaagcggtcgcaggcacgatccggtcctccgcggtcggcaggggtggccagttccctgtgtctgacttcgtcaccgggcggctgggcgggaaggcgaggcctcccggtggactcatctgagcggacaaccaatcgtccttcagctttgcggctgtcttcctgaggaagcttgtcctctcgcggctccgttcagactcggttgatctccggatgaacggcagctcaggcatgatggtcggataggatagctcgggcacagagatcggagacgaccgctcgggtacggaagtcgggtaggcgggcgacgactgctgaggtccggatcgagtgcgctgctgttggcctcccgaggccttggacgccgtcgagcttgccggtccggctggaggagctgcagccgactcgcccacgagcagcggactcaacatttgcggagagctgaggccgtcggtggccgtgacgagcggcccaagggctgcaggccttgggctgactcgctgggcgacctctgccgccttcttggcctcgagccggtcggttaacgtctgcgagtgactccttccgctaaaatttcggctacagttgacgagcttgccagccagacgagagggtcctgcctgcatgatgtgtcgacctgctcaggtgcgaggttcggggacgcgacggctaggtgccaggcgtgatggcgcggagggccgggacagctcgttgcagctagagcctgcgcgactgcaggcgttcagtcgagctctgtctgtcctcctgcgagagcggggtcgggcgaggcagatgaggcgaggtgagagtcgcaggccgaacgtcgaggccgaggtcagcttcgagcttccgacgcttcgccttgggtcctgttaacatccatctcgtcctcccctcttcctcggctagacctcctgcgctcctcttgctcgatggcggccctgacaggcatcatcatcctcacggcggccctcaagccgctgatcacgacgcccttccggccagcgtcgctcctgccgctctacactgaggccttcaccgcggccgccgccgccagaggcaagcggtcggacgcgacggcggccggcccgtcgtctgcgagggacaacgactgcgtgctctgggtcggcgaggggatcggtagcctctgctggattaatcggggcggcctcttcttcctctgcggagtcggcaaggagggtcagtcgcaggatgatgctctcgaccgattgacgctgcgccctgctgacagcaatcgttcctttgctcttactattcccttgcagccaaccctctgctggtcttccgctttcttgaagtctttgccgacgtcctgaccgagtacctgggcgaggtgcgtggtcctcgagacacttgcgttgttctcccagctgacgccgtcctgctctcgcttatcctcgcagatcaccgagacgcagatcaaggacaactttgacgtcgtctaccaggtgccgtccacgatgccttctcacacggttcttggactgcactgacgtgctttggttcctgcagctgctcgaggagatgctcgacgagggctacccgctgacgactgagagcaacctgctgcgggacattgtcctcccgccgacgcttctctccaaggtcctctcagccgctggcgtctcggggtacggtcgctgtgccccctaagtcgaatttcaaacacttgcactgacgtcggccttgccttccccttgcgtatccaggctcggcggcccagccctcggtcagcccttctcctccccgataccctggcgtcggcccggcgtcaagcactcgtcggctgagatcttcttcgactttgccgagtcgctcgcgcttacgctcgatcggaagggcgctgtcgtccgggacgagcgatggggcgtgctcgagtgcaacgcccggctgagcggcgtgcccgagatcagcctccatctcggcggaggggcgatcaagggccagggcctccatccttgcgttaggtacggccagactcatggtcaatggagcgggttctcggctgatctccagaccccttcctttcctcccgcggcgcaggctcggccgctacgagaaggacggcacgctctcgtttatcccgcccgatggccgcttccggctgatggactacgttattccgcctccggcggcagggagcgcggcgggttcgacggcactcagctcgaaccgctcgggcggtatcgaggagcaggctggcgtccgctttcggacgcgcgtcaggctgaacgagagtggcggtgcgttcctggttcctcctgctccttcacttgccctccaagcgctgacacacggtcgcgtgtcgctccgctctcgcttagggacgtttgaactctcgatagcctcaacccagccggcccggccgcttgaaaacaccgtcttgcgctggaacctcggcgaaggcgtcgtccctgcaaagacggcggtctttggcgcctcggccgaggacggcgcacggtgggaggtcgagggcggtcaggtacgcttttctttctctcttgttttgcttgcttggtaccccttccactccggtagagggctaatggcttcttccgcccgttcctcctttgtacaaccggacgctcgagcacagaccctcgtctggcggctcggtctcatccctcctcactcgccaccgcgcactctttccggctcattcacgaccgcgccgtcgccttcaccgtcccactccccctcacccttcccctcttcctcctccccctggcttcgccccccccggcttccgcccgcagtagatgcccagccctcagacgtgcggatgacggcggtctgcgtgcagctggccaccgaccgtcgtccaacgcctgtcgcaccggacgggcgtcgacgagctggaaaacgacgttgctctgttccgtcggaagagtcgagccgcgcatgacctcttgcttctccctttcctcgctttcacaatgaagatgtactaccttatcgggcccagctgcttcgaaagaaggagggcaaccgtcgcgtcgactggcgagcgctgcgccgagaaggtcgatctggcgacgcgagagcagccttcctcttgccagcaacctcgacttacctttcacctcgcccgtcattctcagccgccccagcgcgacagacagtcagtcccaagccggccggcatgtacttctacttgagcttcctccggccgccgcccgtctcatcgccggtcggtgagaagatcgtcctgacgccgcaagtcgccaatgacctccgaaccgagctgtaaggtcggttcaacaccactgcccgcatgggggacctcggtcgactgacgactgcttcctcgcgctgctttcaggctcgaggatgagatccgcatcagctaccagtggctgccggtgacggcggcgacggcgaccatccctcagcggccgctgccgctgacgacctggtacggctccggttcggcctacaagacgctgtcggtcgagccgcccaagggcgttaagaccggagaaacctggtcgctcgctctcttttgctcgcttccggctgccgcctcggaatcgagctcgttcggagctgtgccgccctacaagacggcgctcgtcgcgctgtcttccgtcgaagacgctggcggctgggtgcccatcccggttcttagcgagcctatctgcttcacgatggccgccaagggagggcccactggggctcctgctgcgtccaaaggcggcaaggccaagttcaaggcggcggacaagattgagaagcaggaccgcatccagcgagcgttcgtcctgccgacgacgccggcggaaggcgacggcccgctcgagatcctcctaacggagcagacgtccttcgatttggacaaagtgggttctaatcaccgctaagcccctttgagacgcggagagctgacccatgccttcgctcgaccttgccgcagaaaatctgggactccggtctggccgttgcagcattactcgcctaccgactcgtcggtcaggccggccttccttggccttcaaggtacctgcccgaaggcgaggcgcacctcgcgcctctactgggactgcttcgggaggtagaggagcggccgcttcgcattctcgagctcggtgcgcccagttgctaggttctcctgtaaactccagtcgtgctgacatcgcagccgaccgctcggccaccgcttccagggaccggcagcgggctagtttccatagcgctagcttgtcttctggcacgctcgtcggaagggaagcatcagatctttgccacggatctacgtgcgtctctgcgctttccgtcgcgcaagaggcggtcccgctgacctgtccctgtcacactcgctgcagcatccgcgctccctctggtcgcgcggaatatccagagcaaccagaccatctttgctgagggagccgacgtgcacggccgggcgcttgactgggaggacgcgtcgctgccgtcttgggtctgggccgaagcgagcgccgagccgcagacattcgaccttgtctgcctcgtcgacgtcacctacaacgttgccatctttccggcgctcctgaagacgttgctggcgctgttacagccgccagcagaagtcccttcgcgagccgtaggcaaagatacgctcgtcctgctggcctggaaggagcgtgatccgaccggtgccgagaaggagctctggcggctggccgagaaggccggcctagtcctccgacatgtcggcagcgacaacgcacacggcggcatacctgtcgagtattgggtcggccgcttgcgacgatgagcctcaatttgcgccttgcttcgcgtctcaagtgacagtcgcgaagtgcgtgtctgacggcgtcatgggctgcgaggctatgaccacggcagagacgcgaggccaccgctttgtagctgatgtgatccgaagcttgcctgatttgggcgcagtcaacgtatccaggacgaggctggaagcgagatgccggacggagcggtttgcgctgagtgcctaggccgggcagagctagcctggccttttggagtcgaggcggcacgcggcatgaagcactcagtagtcgtactcgtcctctgcgagcgcgcccgtcgaaggggctgcgccagaagcagacgcctctggctcgtcatcgaaccaacggtcctcggacaagctatggctgatcggcggatcgagcgactcgtcaaagtcgactacgtcgtacggtagagactgcaagaggtcaaggctcttcgggtcagcacatgcccaggatactcgcgagaagaaggacggacctcgtgaccgtcgatccacttctcgcggacgagacgctcgaacacctgcaagcgctcctcgccgctgagctcttcgtccggcccgacaaagccgccgtcgtcctggggctggtcgacctcctcgtcttcgtcctcgctctcgctgtcgaactcctccgtcacctcgttctcgcggaggcgctcttcccgcttccggtcgcgccgacgctcgccctcgcgttcgtcctcgaacgattgaaggagagcaccgaggttgccgtgctgcgcccgaccgccgaggaccgctcgattctggccccatgcatcctcggcctcgtctgccgcacctgacggccgagctggaggagcgacctcgtggcctacgatgcgctcgtacaggagcgggtgtctgtctcgcgcgctgtatgctgacagagcgggcggcgatgctagagcccactggagccgacggttgcggatggtcgggataccagaccggacctgaggcgtcacgacaggcccgaagtaggctgccaggttaggcgggagcgcatcgatgtgcgtcgcgaggaagtgcagcggagccgagggtagtgccagcggcggaggtgcagctgcgacggtcgagctgccgtcggcggtcgccgttgagactggcggcagcaggccgaggtagccgaggattgcctggagctggagcggctcgaggaccggggcagaagcgtcgacaggctggatggccatgtccaaggaaagaggctgaggatggaaaggaagtcgaaggagtggtggacgttggcggtggcaacgacggcgcggctccgaagtttggcgtcgtcggctgagagcatgacgagcctccttggaggtagagtcgtgagcagaatgcatcggccgagacagggtacgtggagggtagaggatgcagggtatgtcaatcacgatggcttgggtatagtgaagcagacgacagtgaggcaattgaaggcagggtatgagcggcggcagaggggcgtgggtatgaaactactgtcaagcaagatggctgctgaggatgagatggcagcgagaaagagggagatgagattgaggggggggtgaaggagtgctttgccgaccgtctagacgatgaagcaggtggccttggagagatcaggtcgcgtcggcgcagttcgttgactcatagctgacgacggagcagaggaagcccagtcagtctccagtcagctgagaagagatcgagcagacgcactcggccagggagactttgtaggcgtcgcgcatcgtttcggcctgccggtcgtagatctgcggtcaagcggtgagaaggtgaaaaggttagctgtcggtccagcctcatagcagcactcgacaggtgccagtctaccacgcacggccctggaatccgcagggagattcttccagacgtcgcctgcgagcttgctctggcgcgagatgctagtctcgccctgaaatacctcggcccgaagcgctgagtcctggcgcacggctcggaggaagacgaaaaacggcgacagaggcttggccggggcgttcgggtccttctgctcgtaacaaggagaagcacgagtcaggcggacgaccttccagccgcaactggagcggcgggtggcgcaacgcaccatgtccttggccgacgactttccgttcctgcgctgcttcgcgcgatggtcgttctcgcgctggatgtccttgcgcgtgagcgatcgctgccatacgagaagctcggctgcgtagaccgtcctctcttcctgggccttctgctggtacgcctagggcaggaagcgtggcatgcacggcagggttagctcaggtttcagcgggctcgaccacgtcaggcctgacgtgcttggcctcctggtcgaggttctggtacgcgaccttcgaatctttcgtcagttgagcgatgttgggtccggtgatgccaccggcacggttcttttcaatggcgtcggcgagaaagagttgccaggccgacttggctttctgttagccccaaacagagaaactgtcagtcgcggcgacagacgatgctcgaagtggtcgacgagaggagacccaccttcggagccggcgcgagtgtgctctgagagagaggttcaggcgaactttctggagcgcgattcgatcgggtcagttcgagcgaaagggagcaagatcaggaggcaggtgcgcaccggcaaaggtagagagcaaccattcagttggaacggcggcgaccgtctcgacagcagtcgaagcatcgggcgccagggtcgagaggctcttggaccggaccggccgggcccgagctgtcggcagctggagtcgaacggggctcggagtcggttcgagcggggcgtaaaggtctggcgtcggcttggtggcggatgacggcgggacggtggaagggtaaggcgcggtccggtccgaagcagacctcttgcgacgccgctcccgcaaggttggaagggtgggtagttcgcctgcaaaggggctgacggggccagtcgccggcgacaatggctgcgagaccgaatgaggaagaccggcagagagaggcgacagagaggttgaatttgcggcgctggataaatggaatctgcggacatgcgaggaggtcaggttgactctaatcttctcagctgacagggcacgcacggcgagaggaagtgggagtcttgcgcgggggtcgagagccaggcgtcgaggccgccgagagaaacgccgtctgctggagcgctgaaaggggccgaatgcgtgtagtagccgaggtgctcctcggtcgtcgaagcaaaatcggtgaggagccgaagcggggcgacgtgcgtccgctcgtgccagttaggcgtcgcccaagtggaggcgacggcggcggcggcgagaggggtatcgccggcgatctgacagccgtagacctgggcgcgtaggctctcctcgtagtcggcaaagtggcccggcgcaggggccgactgtgagacgaccgttgagatgtcattgctgggtcttgccgaggccgggtcggccgcgcagtcggaggtcgcggcggcggcagcgaggggaaggtctgggcgtgccgtgcgtccgttgcttgaccagagagcagcagtaggccagactggtgccagcgagggcttctcccagacaatggcagagggccaagcggcctgtggccagtcgttcgccgggcgcgcggtcaccgttgacgacaggggtgcgaagctgcggggaccgtcgctggctggaggaagggcgcctgcaaggtcgtagccgccctcgataaccgaggtcaccgcaagggcgcccggctgcatctcgtgatcaccgaccctctctgcctcgctagagagataggctgggtacgtcggctcgactgacccctgatcgccgaggtcgagcgacgtggggtcattggctactcgcgcgggcacttcgccgaccgatgagctctcgtacgcgacccaggccggctggtcacgcgagctgccgtcttcgtccgtgtacgtccagccggtcgggctgcggccggcagcgccgaggggccagagcgatgtcatcgcgcagctgtcggcggcgccgtcgaccgagatggctagaggcgtctggctgccagcagccgtcgctccgaggctcgcgtcggtcgtgaccgtccgtcgccggcgccaggccaggtcgggcagcgtcaaggtcaggatcggcggggccatctctcgtgtctcgggcttgctgggacgtcgtcgacaggtcgctcgcgcccacccgaagtcaacgctcggtcgcgtcgttggataacctgttggaatgcatcgcctgatgcatctcaagagcctattcgctcgctcgcctgcacgcggctctcaacgatctccccttgtctccgtccctcgccggctcctccatcacacgctcgtccgacgacgtccctactgcacgctctctcttcatctcccgcactcagtttccagccagcgcccgactggaatcgcctagactcctgtcctcgccaaagccaagcgcagcccgaaccctcgcaaccttgttcgaccgcgcggccggccacctcgttggctagctgtctgcccggcctcttgacccttcaggtcacagccggtctagctcgtctgtccagcgtctcagtccaatcgtgactgcgcataggcactcgctgaccgcctcgactctcgcacagctcgacgcgcatggcggcctcgacctcagcatcgcccgcccagctcggaagcgctgcgccggcgaccttgcctctgctcccctcgtccgacgcggtcgaccaggccgagcgcgatccggcctctgtccgctctctcgcggttgctaagctccggcgggcggcctcgcttccgcgccagaaggacggtcggcggcctgcatcgcccgcagtcgtcacggcgcccgagacgccgcctcttgaccaggaggcgcgctcgtcgcccgcgacagcatcgtcctcgcgaagtcatctgccggacgagaacgactccttccggggtcggatagactggtcgatcgactacgaagaggctcaagtcgggcaggaccagacactcccaccagcagcgacgatgtttcccccgctcggccagcccgtccagcggctgcagcggtcggcgtcagtctcggcccagcactctgccgacggccgggtcaacctgcttcctactctgcaggctatccagtcgcgccatctgctccagcgttccaattcgcggaccgaggcaatggcccgcctgaccggtgagcgcctctctcgcagcaagccgccaagtccgatgcgggaggcggaggtccttgcaaagaccgcttctgcggcagccgacctcgttctaccgtcggcactgtcagatcttccggccgcgccgccccgtccgcgactcgggagaagcttcaccatctcgaccggcgcgagcggcgagcggcggagtgtcgtcggtcggcgaatgatggctcggctgggcaaccgcgcggcagccgcagccgtcgatggtccggctgctgatgaatcgagcccgagaattgcagccctctctccaccgcctaattcaagctctggtgcttcggccgagcacgtcgcgacagacgagccgacggtcgtccggggagacgctggtgaggagaaggaggagaaggaagaagaggaagaggaggagattctctccggcccgtccttcaaccagagcttcctcaccgagaacgtcatacgcaactcgcatgacgcgacaaacgacatcgttgacctctccaacgacggcggaagtccgatgcgcccgcaggtactcacgacgccggcgacgccatcgcgaggcggcggcggctcagatgacggcgcgcgagagtcgcttgactctccttttgagcgttcgatgcaccaggctctgggcagcaacggagccgactttgaagacggtcgagtcagcgccggtggcatgaccgactcgttcgagttctcggacctccttcggcggacaaactcggctcggacgacgacgccccatccgccgtcgtcggtcggctctaatgcggcctacgatgacgtggtccaccctgttccatccacgctagccggcctgccgcctcgcgcaccgcagtacggcgaggacagcaccccgccccgctcggcacacagcagctcgcagcccttcccgggcgtcgactcgccgtcgatcccgatcttgccgccctcagcaggagcagaccgaccgaccttcttcccgaacgggctcgatcgcggcggagaggagcggctgcgggcagcgagtcaggccagctttcctgtcagcatcgcgccgggcgatgcgctccgcacaggagctaacgcggagccgatgccggagagtggcgcacagcgtgctttggcctatgaacggcgtcccagcaacgagagagaagccgatgacgactcgagtacgttcttctttgtctcttcctggctgctcggcatgagctgatgcgttgcctcccttcccttctcagcccccatgctctctcagtcggcgtttccccgtccctcgattaccgcgagcgaggcttcctcgcaagcgacaccgctcggtcgcagcccagccgtcactcaagaggcccagttcgctcgtcaaagccaagacctctcgcccacgcaaagcccagctcgatccggtgttggcttgccgcgagatccacgcctatcggctgaactaggtcgctcgccaagccaatccggcgcctttgggccaacgctcaacctcgagcggtatgccgactcgaagctggctcccttcccgggtatcaccgagagcggcggtggacggtctcgcggcgcaagcatcagctcgctcagccctgctgtcgcgcctctggcgtctgggccgaagtatatcgacctcgtctcttcgcggccggtctcgcccgagcagcctgccagcaagaagtcgtggctcgctaagaagtttaagactagtggcaccgcgcacgaccgcaagcagtcgacggacgaaggttcctcgctagcctctccagcgccttcgatggtccgacggccgtccgccgtcgactcgctccgggccgaggaatctgcccggtcgatccgccgaccctctacacaggactctcttcgtcttggttcgccttcgccgtcgccatccgcgacggcagtcgcgctcgatcggcgaccatcacagagcaacctttcgcctcagcagccggttgccagctctctggcaggatcgcctgccgtctcgcccgccgcccagacggcctcgcttcccctcttcacgacgccgacccttgcgccgccgctcgaactgttcgacaccccggaggaggccgaggattcgcagtacgaggacgagccggagcatcggtcgcgggcaacaccagccggttccgcttcgccgggcgagcctctcgacgccggcgccccagcaaacgccgtcttcacgccgaagtcaatcgatattctctcgcggctcgacaaggtccttggcatcgcggcgtcacttccggccaggccgtcccagctgtccattccaccgcgaacccttcttcttcactcgccctgcctgcaggtcgtcaataacaacgttcgtcttctattcgagtcacaagcggcccagcactgaccgctctgcttgctcgtctctcatcagacggcgaaggaccggtacctgttcctgttcaccgacttgctcgtgatcggcaaacccatcctcagcgacggcgagatgccgacgctcgaccacaaatttatcgtcaagagcatcgtcgagctgcccaagctgaagtgcgtcttgcccacggctagttgagactttcctggtcccgtcctgacctgccgaacccgacaggctgagcggcctccgcgatgacgacggcatgcccgacacgatcaagtcgcagcacccgctggtcgtcagcttcgtccagacgtttgccaccgacccagcgctagccgtccatgagctcgtcgagcagagtggcctgccggaggatagtgttgcctcgatgctcttcaagacgatcgagcttgaccggacacggctcggcgagtttctttcggccaagaagaatgctggcctcttccgccagttcctggtcaagtactcgtttggcggcgttcgcatcgacgaggctctgcgcatcttcctgctgtcgcttcgccttccgaccgaagccaacgccggtgagcgcttgctcgtcggctttgccgttcagtggcaggaggccaacgcagcggtcgcctccttcccggccgacattgccattcagctcgtgctggccatcatgcagcttaatgtgcgccagcagcctacgacgtcgtctcagactgcagcggtcatgactgacatcaccatcgttcatcaggacgccctaaacccaacctcgtcctttgggtcgtacggctttggcaatcaagccatctcggtggacgactttatcgctgccttccgcgtgcacgaccctcgctgcctcgtcggcgacgatctcctcgaggccctctagtgagtctctcttccttgcacaacagccgtcttgtcatcaatctgactgtcgccaccgcccaactcgttctaagcgtctcgatcaagaacgagaagctgtcgcaggcgctgtcgccggaagacgcctcgcttgagcgcgacatctatgttgtgcgcctcttcttgcattctgatctgaagttaggccataggctgaccttcttccctctcactagctgccaactcggatcacttcgcgtctgacgtaccgcgtcgcgagcgacccaatctacatcacgattccggagccggacccgaagcttaccatccggcttcatggcgccggcctctccttcgacccgcccgtcctgacgtttgcgaacgcctctcgggtgtcgttccgagttactggtcagtttgattgacgaccattggccactcgctcgcttcggcgctgattccctttttcgctccctcgcaggcgtctcgcttggttcaaagaccatgctgatctcgcgcattgggccgaccgcgtcgctctacacggccctcccgatcagcaagtctttcgaggtgatgcgggcattcatgcgtcccggccacaccttccagctgtccttcacgcgcgagccaaccaatacgaggcgcaagtatctcttcagcttcgaggacctcgagacacggctccgctgggccggcaccctccaaggccagattcagcgctcgatcgtcgcgcggcagaacgtcgacctccagggatccatctcttcgcgggtccgtgaggccgcagaggtcgttgcactccaggtcctgcgcgatgccctcttgccggtcgacccagatgcgcagccaagccggagaggccccgacggcaagtcggcggccggtcttcagcggtccgcctcagtttctcaagtctaccgtgcggcctcatcttctggtcctctgtcagcgtccttgattgctgatctgccgtttgcggctcctcgcagctcttcgggccggacgaattgaagccgacctcgatgccgaacttaagcgcgaccgaggacaaggcgcgacatcctcccggacgcggccgggtccgactcggcataatacgacggccgacagcccgagacttactcaggagctcgagggcctggccgcatccaagttcttcccggcgcagaccggccggcagatcagcgtccagtgcgagcagaacaggtgcggcgctttgcgatcgacttcgggtctatagctggtcgacgacgcctgatgtcgtcactctctttgcagcttgatccctctcgttctctctttccttcaacaggggatcccgcagccgcagagctcgtccccaacgaagggccatctaagcgggctcggcatctcatgaccagcctcggcacgaccccgatgcccgctcgccccccgcccgacaacaaacacctccttttgggctttggatctttcatgaatgtagcaacaagagagctacagcggagaagggaagagaggagaaaaacatgggagtgaggagacacgccgagcaagcagggtggatgcgaggaaacatgcgaggaatgtggtggagagggcagcgaggggtagatggagatgcaagtaacaaggccaacagaggggcggctacaaggagtcaagaatggaagctgggtcgacatagtcgtagacgtgactgcaggggatcaaaagaagcagcgtcagccacagagacccttccgtaggtcgagtcgacgatgacggtcgcacctcttgttcttgcccttggccttgccatcgtcgtctacgtcctctacctcgtcttcgcgctgcgccggacgcccggcagtgctccacttttcgtcgatgccagcgaccttgcgtcgctcggccgccgcttcggcccagagctgctggaagccttcatcatccaggacgccctcgtggactgcccgggcgacgcggccctgctggaggattgttgccggagcgatggtgagaagcgactcgaaggccgactgtgaaaaggtcgccggcggagtctgcggtggcaaggtcgatgcggttgacgtgggcgaagccggcgcggacgcagtgtacgagagagccggctgcgacgacgtcgaggatgtcgaggcgaggttgaactggctagagcggtggaggtggagatgcgaggtgatgagggccttcagttgatcctgaggaagtatgcaccacaacgatcacacgtcagcgtcctgttccggtaaaaaggagtcaagagagacaatcatcgtcggcacgcacctccagagctgcgttgaggaactggccgacgcctggagtggctccttcgaggccgttgtcgagcgaagcgcgagtgacgcggctcctcaggtcgtctgccgatgggaggaagcggctctcgacagccgtcgcgagatgaggcgggtgctgggtgatcgcggctgtgagtcgaagggagatcgagtcagctggcggcaccaatgtgcgcgggcgacggacgagaatcctcttcaagaagaagcgatgtacctgttggtagcggcgatcgcgactcatcctcgacgttgacactcgaagaggggccgaggacagcccgctcgcgcgtgagctcggagccgccgacccagccagcgccagtccggcgccgctcgtcccgccgacgttcgacgtccttcatcgtcttctcgatagactcctcgtaagcgtcgcggaccttgagcttctcgcgctcgcggcgcgacgtgccgaggacccagctgaggacccgccgcttggctccataaggcgtgacgtcgtctggccggtggcgcttggcctggcctggcccgggtgcgggtgtcgtcgacgagttgtgcgcgttcgagacgatcgccatgagaaaatggttgtgaagcggcactgttgaaagcaggaggtcgagcgtcagccaatcgcagccggcaaccggcgaggcctcctgaaacgccatctcgcgcgggagatgaaacgggcgggcagtggaaaagggggaaagggggcggccaggcgacgttgccatggcggccgcgcaggagggaacctcccgcgcgaaaaagcatgtggccagacgaccacttcccggccacctcctgaccgccacgagcccgacctcgacgagcgagtagcatgagccgattggcatgaccgaggcgaatctagcgcaccaagaattgaagctggatgggccggctagcggtggcagtcggatgccaaagcatggtccgggagctcgtctcggctgaggcccttgggcgcgggcgcgccggcggcgagctcgacctcccctgcgagggttcgtcgccgccgcccgatcgatccatccatccacccgccagcagctcttttcgagctgtcggtggcgatggatggccggaccgtccagcttccatatgccccggccagaaaataatggaggcaaaggaagtgccgggagacgcaccaaattgccggtcgacgacgccggcgaggctcatgacgaggtcctcgagttcctggcggccgagcttgccggtaagaaactcacggagggcctcccagtaaggcaagccccgggagccgagtacgtcgtgtagctgctgcttctggatgcgaggtggcgggagaaacgggaggccaggtgtcagccacggctttgcaggcgtggcctcggagcggcgggaagggagctcacgatggcgaccgtgtcgacccggacgtagggcgccgctggcggcggtggtgccttaggtgctgcctgctctcgaacgtcggccatggctgctggatggagaatcgtcggtcgatggggctgggtcgtcgagcgggggaagggaggggcggcggcgtccagcagggtcgggctggcgagccgtcgttcgtgcctccgctgtaaatgagggcagcgcagcaacccacctctcgcccgtttgcacttgcgaccaaccggcccagaagccgccaatggacgcaaaccaggcgctggcaccttctctccgggctagcgggctcgacagcatgaggcgattgcagcagggacgggtgcgcgatggggacggcagtgcatgatgagaaggctgagagcggtaatgagcttcaccgcggcgagggcagaggtggatgtgatggagtgtgttacggggcagctctggccagaggtcgcagcgagagatgcggagaaaaaatgtgggtcgtaaagtctagaggaggtggctgtcataggaggaggcgatgcagggcgagagtccggatgaaggaaaggggcgtgtcggaagagtctgaagccactacggccgagaggaaggaaagatagggaggaggccgggaaggtctaagcggtcaagagagcaagggtgtcatcactggccctggaggatctgatcgatgcaggagttgagccaggcgacacggcccgagaggtcggccttggggaagcgcgcaaagacggcagcgcgcgaggtcctgcggcgagtggagcagaccggttagcactaaagcgagcgatgggaccacagaggtcgatactgactttttcgtgacggtcatgaggtcctgcgacgagaggtagtgccggagctcggcgaggatctcgtcatcggtcgggtcgatgctctcgctcggcggcgtcgcgccaaagaggttggccgtcgtcgcgagcgaaaaggtcgacatgcgcgcgttgcccatgccaccgccgaggccgagctggttcgggaagttgccgccgccgtaggacgaggccggaccgccgggcatcgagccggcatacgacttaaggctcatcatcgtgttgcgcggcgcgcccatgcccgggaactgcggcggcagcagcgactgcgaatagtcggatccggcgtgcgggccggcgttgaagcccatcggcggcaacatcatcggcgcgccaaacggcagcgcagggttgccatactgcgagccaccagcgccgtactgcgagccgggggcggtgaacggcgagccggcggcagaccgaaggttctggttcgagtcgtggtgcttaagcggcgagctgtcgcggctgcgttgggtgagtcggcacagacgagtcagacccggaaacgttcgactgacggattttcgacttactagtagtcgccgccgctgggcgagttgtagccgctgttggctgccgcgcgggcccgtggtcgggcgctctcgcgctgcgagccgtagtcgctgccggcaattgagcccgagtcctggcgcgagaccttctcccagacctcgttctcgtagtctgcagggcctgggaggtcagtactgcgcgtaagacggtgaagcaagtcaaaggacgtaccgctgaacttcttgagcgggatcatcgagtcgtcaaagtactcgtcctcgggcatctggataatcttgtccttaccctcgccgacgacgacgcgagtgtttccccaactgaagtcgtccatgctccagaaggagtagatcggcaggaagaacgagtagatcgggtacctgccggcgaaaagcgcgcgggtcagcggtgcgaagaaccgcagaccgtcccgtgcaaggaactaacgcaaggatgtagatgaccatccagccaatgagcatgaactcgcgcttgatgaggaagatgatgacctgtggacgaattgcagtcgatcaggcagcgttcacgatagggtcagatgctctgcaaccgcgcgtacctgcaggccgtaggtcgcgccaatcatcgcaagcgcaatgatgggaatgggcgcctggccgatggctaagagagaaaggaagggtggcaaggtcagcggcagtctcaaaagaagatgcaaggccagcccctgagagcaactcaccgacggtaatgataaggtagaagagctgaatgggcggagcggtgagcgttcgtccgcgacgagaagaaacagggcaggaagggaattcacatagacacaggtagcaggcaggatctgaacgcagaagagcaaagggagaggcgtcagcgggtgcggcagtcgaagacaaaaaagccgcgggacgtacaattgttccgatgaggtcgaggaagacgatgaagcgcatcgaaaagatgcagaagccacacatctctggcaggaagtagagctcgccgaggttgtggatggtcgagttgatccaacgccgccgctgcgagaggagaaccgaccatcggtcgggcgcgaccgtgtaggccagcgcgtcgggcgtaaacttcatcttgtaggacgggaaatacttcatcatgagcgtcgtcaggtatcggtcctcgccgagcgagaagaggttcttcttatgaagcgtgtcgacgaccggctccgagtaatcgtcgatgatgcgctgcgagatgatgatgggccggcccttgtcggccgtccgcaggcggtagaccgagaagcagccaggcaggcaggtgaccgagccaaagagcgactcgaacgccttggcgagatggtgcgacataaagtactcgtagaccttaagggagcaggagcggtggtcagcttggagcgaccagtgatgtaggccggcctgaggaagtagacgcacctggatcatcgtcgtccacgactgcatctcgttctggagcttggtctcgccgcagatgccgatgatggccgagtcgtcgatcgtgcacgagatcatgcggttcagcgactcgggtgcgacgcactggaggtcgattccggcgtcagcttccaatcaaagagggtgacaggtggcaggggacggaccgtgtcggcgtcgacttggaagaggtactcgtaaaaggccgggtcgatgccgatgacgttgcgcatctgatggtacatttcgagctctagcgggcacatcggtgcgtcaaagtgtacccggttgaggtagcgcaagagaaggcattgcgagtcgcgcttgccacggttgccaggcttgctacgctcacgcggcgagccgaccttgacgacgaccatatagctgtcgcgagcgagggtaaaaaaatctcggcgtcagcaaagagcaggtgggtgcgaaagagtgaccgaaagcagtcgacgcacggaacgacgtggccctcaaactcgtacaggcccgagtagaccttgccgtagttgatctgcttcgagccctcggcgaccgacttgaacatgagcgggtcggcctcaaccttctcgtcgacgccgagaatgtcgagcacgatccgcggcgtcggcttgtcgttgccgctgccgtagatgttgccgtcgcagatgataaacatgagcttgcgcttgtcgtcgtactggagcgcggcgagcgaatcgatagtcgtccggagcgactcttcgccctcggtgtagcacggcacctggcagatgacaaacttgtcgagcatctcggggttgcgtttactcgacagctgaagcgcggccaggactgaagagggcaaaagctttgagcgtcagcacctgtcaagtcagaaaggacagaggcagcagaggagcaacggacacttggcaccgatggtgagcatgatgatgaccgaaaaggcgagcaggatgtagttgttgacggtgcagcgcggcgtgtcgcgaaagtcggtccggccgacgtaaaaggcgttccggaggcaggtgtactgctgggcggcgtacgtcgcgttcatcgcgccgagggccttctccatgcgcgtcgtcagatccttgcccggctggttctggaagagccgcgtgatcgagtcgtcgaggaacgagtactgcgagtcgctgctgttggcggcctcgtagtaggtgagcgtctggaggtagtcagagatgtcgtagacgccgtccttgtaaacgccccaggtcctgcagggcagcaggggagccatacggtcagcgagggagacgcctcaaagagaaggggccggcgaaaactcacttggctcccgagtcagcctggccctggatctcgcccttgctccagacgaagtcgcccttgtaaaagtccttcatgaacgggaggaactgattggggtaccactggttgtcggcgagcgcgtccgagccatagttctgctgcctgcctgaccagtggacggcatagtcggcgaccggcgtaaaattgcgctggagcgtgagcgtctcgtccgtgacgaggccggggcacgaaacggtgaacgggatcgggaaatagtcggtgagatcctggcctgcgagctggagcatgatgtcgtcggtgaccgggtaggccgcgacgtcgctgtgttggccctgccagaactcggtaatgtcgtaaaccttgcctgcaggagggcaagagcaaaggttgcgtcagcgagggacgtaggctagagtcggcggcccgagcgacgtacctgcgacggcgacgaagaagtcgttctcttgggcgtgctcgccgagctggctcgtgttccaggccttggcaaagttgggacagagcaggcggccaaagatgacgacgtagaagatgacgacggcgcacatgaagaagatgctgaggaagatagcgagcttctcgcgccaggcgagccggatgtcggcccgcttcatgccgccgcacgacttgagcgcaaacgtcggcacccaccacgtcgtcagcatgacgtagcgcagccaccagacgcgcgcccgggtctcctcgatcttctcctcgagcaagccgggccgcttctcgttgacgacaaggccgtcggcgaggtccttggcgacctgatcgctcgggtcgttctcgcgccggtcggcccggagcggatgctcggccgcgcccttgtcgtcccactgctcgggctcgatccaactcgaggcgtagccgttcttgccgatcgagcgggcgtcgccaccatagccctggccctgggcgggttcaagatagcccgagccatgcgtgtccgtccgctggaggacgaggttctgctggctctcggacccgactccgtcaccagcccagggcgtggtgaggccggcaaaggcggcgccgtcgtcgcgctcctccaccggctcgtcgacttcgcccccggcctcggtcgaccggagctcgtcgtcgatcgcgcgccaggccgagtagttgagccagatgcgctcttcgccaatagcgaagtcggtgccctccgaccaaccgcgggtggtcgcaaagttgaggatggccgccgcgccgtggccctctccgagaccgtagcggtagcaaaagtcggcgaacgcaaacgacgtcacatactcggtctggcgccggactacaaggtctggcagcaagagcgcacgaacctgcgacttgacgcgccgtttgtcaaacgcattcggtagggcgttgtcgttcggccggatgcagaggacgtcccaggtccggctctgttcgtaagccgtgatgatctcggccagcgtcgcgttgagctgggtcgtcaccgggtagatcttaccctcgacgagcagcgactctggctctgggctcgcgccgtcggcaaagggcgaggccgcggccggcgtcgggtgctgaagcggcgtgacggggatctgagcttggacgacagcctcgttgtcgttcgggtgcgtttcgattgcaataccggccgacgagagccggctgacaaaggcgttgcgcgagccgcggagtagatcgacgagcgaggggtcaagcacgtccatgttcttctcgacgaagccgtggatgtcgtacgagatgctgccggcatagtggttgatgccgaacagcttcttctcgcgcatcgccgacgggccgaggccgacctcgggcgaagtgacgaatgaggcgtgcgggccaaacttgtcggtcaggccctcgagcagctggacgtccttgtcccagtcagtcgagccccgcgtcgacggcatgatgcagttacggctgaggaacccggcaaggccgccaaccttgcggtcgtacttgctgccgacgggtccaccgcgaagtaggtcgacacagccggcgttgtccatcgtcatgaccgcagggagcgagacccggtcggcagtcaagccggcgttgaagccgtggccgtcgctgaaagcccggcggacgtacgaggcgtggctaagctctgccgcatagttgaagttaaattcttcgaacaagttctgaccgttggccgacgcgacgagcggtgcgcggtcgacaaactggagcgagccgctcggcgaccggctctggtagcccggctggtcaaagaccgagacgaccgtccggccgccggcaacagcttcggcttcgggctcgaggttgcggttgatcgtgtcgacgacataagcaaaaaggagcgtgtagctgtcgcggacgagcgcgtcccgttggcgggcggcctcgccggcattgaggaagcgcgacgtgagttcattccggacaaaggccgacttgttggtgagggcctgttcaagctcggccgggccgaggccgagcagatcggccacctcgtcaagcacctcggggttgctgacggtcgccgactcgtatgagagctcgtactcgccattgtcggagaactcgaggttgccgaggaggaggatcgccgtcaggagctgccagattgaagcgaggtgccggtgcttgaagccgaggttggccatcgacgcccggagctcgcccatctgggcgtggtcgtcgctgagcggtccaccgggaaggaggtagcagccggatgaggcgagcaaagcgtagctcgaagggtcgtcaaggtttagcgagtggcgctcgtccgggtcggcaccggcgagcagctggtaaaagacgttgtacgaccgctcatcctgccggagccggttgacgcgcgatttgtcaaggccaaagacgaggagcttgccaccggcgacccggccggcgtccgtcaggtgcagttcgaggtacttgccgaagcgcgaggccgaggcgttcgtcggcgtcttggctgtgccaaacgagtcgagaacattgtagaccgacgtgatgcgctcggcgatgcgcttctcggccttcgaccgtgcggcgaggcgcagcacctgctcgacgaaacgctcagagttgaacgtcttgccagaaccggtcagaccactgcgagcgggacacagaacgtcagagtcagtcgggcgatctatcaaagctcaaccttgttccatccgcacctgaagacgacggcctggttctcgcgcttccggctcgcgagcgcaaacacgcgaacggcgagctcgtagatgtgaggctggagcgaccggtccggcctaggcccgggcgccgtgctcgtccagtccttgtcggcgtaggcatttgcgctcgcctcgttcaggttgccgagcgtcttgagcgggttgacgacaagcaggaccgaggccccgagccgagtgtagggcagatctgatcggaagcggccctggagcaggctgacgagctcgtcgtcagaggggtaaagcgagacaccgccctggtccttaatgagcgagagcgcgtcatgtttcgtcgtgatctccctcggcggggcgggcgccgccggtgccatcgcggagagaagacgaggtgggaagaaggaggtggaggaggaggcgtgagccggtcggcggcgacctgagggcctgcgcgcgcgagagccaagcgagaggtggttcgacagctcgtcagtgggaaagctcgataaaagctctacctgaaggctgctccggtggcgcaagactcacaagctggtgtaatctgccaggcgagagcaagagagcggagcgttcaaacggggaggtcaaggggaggctctggctggcgagctgccgagagagggggatgcaaaacacgccgttagtggcgaatcgctcgtctcgatgggcgacctttgaaggcagccggcgacagcgagctactgacctgcgctagctcggctcgcacaaacgacagtcaaagggagaatgagaaggcggagagacgtggctagggtttgcgagcgaaggagccggttgggcgagaagaggcgcgcggcggccgatggctgcgcgggcggaggcggctggccggttttgagtggcggctcgagactcgtctgtcggcggtcgagtacgcgagagagcaaactatgtcggcaagagggatcggtcggctgatcggtcggtcggtgacgagtggagctgtcaagaaggagcaggcgggctgctgattcgcgaaaggatcccagctgtctgtcggtcggtcaccctgcgaagtggagcccgcgtcgaccttgaaacgtcggcccgtagcccctttctgcagatcgcgcgagagaggcaccggacgagggcagaagggttgcgcgggggcgtcatggggattcgtcaaagcgagcgagtgaagggaagcaaagggtctgcagtgtgtgtgtgcgttagaatgccaggtgtgagggtgtgcgataaaaggacgagcttgcgggttgcagacggactcgtgcgagggcgaggtgggccgacaggctcaaaagtaggccgccttgggtccgggtagtggagcgtgttgatgctggatcgcggcgacacagggtaaatcgccgtcgagcgtagatgagtcggtcgtgaggcgggagccggcgatcgagagatcggttttgtcgagcgaaaggggtgatcagcggtgaacagcgtggattgggcaggctgcagaaaatggacacggctgtcgtcagcgtacgacacagctcatccaggacttcatcaggggacgaacgcttgtcgcccatcgctacggcgtctccgtggccgacctcgtgccagtcgccgccggcccagacctcgtctacgaagggcggagggggagcgtcagaacctgcttgatgaccgccaggtgctagaaggggcggaagcagcaaggacatacgaaggcccggctcctcgacgcggtgcatgcgcttgcagacgccctcttggggcttgcgcgggccgtctgcgtcctcgtcgacgcccggcctctggagccacgggtgctttagcgcgtcggctgccgtcaggcgcttgcacgggtcgagggcgaggcagcgcttaaggaggtcgagcgcctgctcgatctcgtgccggtgttgagcctcggacggcggaggctcgtagaaagggtcgtcgaggaagaggggctttggcggcgggaaggccttgtggttccagagatcggggttcgagacgagcacgatcgactcgagcgaccggccctcgtggtcgatcgagggtaggtttgagaggaacgtccggttgtggatcgccgcgcacttgtccatccgagccttgccaaagatggcgctgatctccatgagcgcctccgtgtcgtcgttcgagttgaagatgggaaacttgcgcgaaaggaaagagaggaggatgatgccgaccgaccagatgtcgatcgctgcagtcagtcaggaatgtcgcgctcgtcagcggcttcgaagcgggatggcagaagcggcgcaggaccgacaggcgttctgatccgggcacttgaatagcacctcgggagcacggaagcctcgcgtgcccgcccgattcgccttgacgctcgccctatggagaaagaaagattgatcggtcagtcgcaagagcatagcgcagcatgccgacaacgctcgacataccgcttgtcctcggccgggaagccaatcttttctggcgcgagcttgctccgtttccggctcgtgtaaatggcctgctcgacggccttggtcgatgcgttgcgctcgcgcttgccgtgcgggtgctcgaatgacgcgcccgtgtgctgacatttcggggcctggtagctcggtggcggcgtgtagcgctggtgtgatacgagggtcagcgcgatcagcgacttgccctgggagagaccctagcatgagagggaccgacctgggcgaggccgtagtcgacgagaatgccaaattgcttctggcagtcgtaaagaaagttggccggcttgacatcgcggtgaatgatgccgcgtgcgtgcgttgctcggagcgcgcgaaacatgtcgcgcaggtagcacttgaggttttcggtcgacatttgccggtagtagttctacaatgggggagggggtgtcagtcgctggagagattgcaagagtccgtcagacagcaggcagacgaacccgaaagtcgtcattacagtggaagggcatgactgcgatgatctggtcctcgtaacggaaggcggtgataagctgcgagatgttggggcagcctctgccgttcggccaatgggcaaagggacgggtcagctcgctgcgcgccgagtttccggagctcaagggccgcacctcaggtcctcgaggattgaaatttcattctcgatccgggccggactcgaggtgacgtagatccgcttcagagcgacgtagaccttggctttccgctggccccgagaggatgcggccgcccgtgagtcttcctcggtcggcaggccagccgaagcgatccagagcgagttgtcgtatgaggcgtgcttcaggtcgaccgccttgtagactgaagagaaagtgcctggggttcgagcatgaggccatggtcagtcgaagagcgggcgtcgttcaggcacgagacgcctgcgcaccttctccgagttggtccaccaggcggtagttgtcctcgagcccggccacggcgtcctcgagctggttcatctcctcgcgaagctgctccctctcccatgtcggccggtagtccatctcgtcctcggtcggctcctccggttccggttctggctcaggctcaggctcttccgggtcgctctgcatcgaaaggaagtcgtcagactcggcatgctcaagtgacgcgcgcgcgggctgatgcacgtcgagagccgagctccggagcgagacgtacgaaagcaaagtcctcgctgacttctttcttaatggtgacgtcgccttcgccgtcgtccccatcctcttcctcttcgtcgccgtcgagcccgtcctcgtcgtcgagatcgtgctgctcgtcgtcgtcgtcgtccataacctcgtcctcctcagacggcgcaacgtacagggcgggcagcacgagtcgtcggagcgcaagcgggtcgacctcggacgacggggtcgatgcgtccggcgaagacgagcgcgggccaaggtaggctggattggacgagtgagccgaggggtaggcgaatgccggagagggcgctgcccctgccgccgtcgtgctggccatggacggaggatcggccggctccaagggcggaaggggcggtctcaagcgattggctggcgagactttgtcggctgctcggtctagagagcggctcaacgggtggacttggaggtgctccggcgaaggggaggagcgagagacggcgcgaagggggtcgagtgcgagaggagacggtcgacgcgtcgagctcagccagaagcccggcatgagctgccgcccagctcgcccggccgtgcgtcgactctttccttcgttcgagtcttacagacttgagtcctcagtcttcgaagcgatctcttgcagtctcttctcagagagcccctctgatgcctgagggcgagtcaagaggccaggagcaaccacctgggctgcctggcacgagctctccggtgcgcgcgtcaagcctgggctcgatgggcgacgaagccgacctcgcccttcctctcgctccctcttcggcttctctcgaggtcagacaggactcgaatcttgttccaagccagtcaccagttatagaccgactctcggctcgagtcagcctgaccggtgtaggctgaggctgccgtcggagccgggctgcgcgccagcctagttttcctccacctctcgtcactacgcgctgctccgaaccgtttcgtcctgaccgtcaaccatcaggacggacgattcgacctcctctcactcttctctctcatacacgcccgacccctgctagatctcgacgcggacccgaccacccatcaacagttctctcgcagcaaaatcgacacgcaagccgccgcccgccgcgatccccttcgagctcgccctctccgtcctcgccactggccttcagcccaccccttccgccatgtcgctcaaggcgttccaggagcagtcgtcgatcaggtcgatctgcgtcattgcgcacgtcgaccatggcaagacgtcgttctgcgactcgctcctctcggccaacaacattatatcgccccggctggccggcagcctgcgttacctcgacagccgcgaagacgaggtcgagcgcggcattacgatggagagcagtgctgtcagcctcggcttccggatgcttcgcaagaagggtgaaggtgcgtctcggtcgcctgcatgtggctcgattttgtccaggtcttgctcatagcgctcgtcgatccgcttcgtagaggtcgtgccgcaagacttcgtcatcaacgtacgtctcgctggccacgtccgtctcagaacagctgctaacacttcatgaaaaccccggccgcagctgattgacacgcccggtcacgtcgatttttcgagcgaggtctcgaccgcctcgcgactgtgcgacggcgcgctcgtcctcgtagacgcggtcgagggtgtctgcacgcaggtccgtcgcaatgttacctcaaggccgcgggccccggactgacctttcactacagacgatttctgttcttcggcaagcgtggaacgacaaactccggccggtcctcgtcatcaacaagattgaccggctgatccttgagctcaagctctcaccgaacgaggcctaccaccacctctcgcagctgatcgagggcgtcaacgctgtcatgggctcgttcttcgcgtccgagcggatggaggacgacctccgttggcacgaggagcgcgagcggcggatgaaggagcgccgcgaggccaaggctggcgaggtcgaggccgacgaggacgatgccgacgacggcgatgagttccaggagaaggacgacgaggacatctactttgcgccggataagggcaacgttatcttcgcgtcggcaatcgacggctgggcgttccgcctcggtcggttcgctcagctgtacgcccagaagctcggcatcaaggaggccaacctaagaaagtgcctctggggcgacttctacctcgaccccaagacgaagcgcgtcgtcagccatcgggcactcaagggccgcacgctcaagccgctgtttgtgcagttcatcctcgacaacatctggaaggtctacgagagcactatcatggaccagtgcgtgctgtttatcgtctttacatcggcgcttgcgatcgctgctgactcgtcgagcttgtcgcgcgaccgcagcaacccggacgtcgtctctaagatcgttacttcgctctcggtcaagctccatccgcgcgacctcaagaccaaggatcaccgccagctgtgcacgatgatcatgtcgcagtggctgccgcttgcgacctcgacgttccagacggtcgtcgagatcatcccgccgccgccggtctcgcagtcgatccgcctgcccaagatgctctacccgacgtcgtaccagtcgcatgccgagccgactacccgtgtcgagcgggcgctgtacgcctgcgatgcctcaaccgaggcgccgctcgtcgtttacgtctccaagatgtttgcagtcaagacgacggacctgccggagcttcgtcgggtcgagatcaccgccgacgaaatgcgcgagcgcggccggatcgagcgcgagcgccgcgcacgggagcgtctgctcgaggaacagctcgacaaggagtcactgatcggcctcggcgccgacggcaagggtccgagtggaacagtgacgccgacagaggggcaggcggctgacggcgctccggccgccccggctgtcaccaagagcgccctcgccgctcctggcattccgctcaacccgtcgccggcgccagtcccgccggccaacggccagacgcccgaggaaaagtcgaccatcatcaacctgtcaggccccaaggtcctcccggcgccggcggcgggtacgacgacgctcgagtccgagacgctgctcggcttcgcccgtctctactccggcacgctcaccaagggcacgccactccaggtgctgttgcctaagtacaacgacaccctgccgccgacacacccgcacaaccagaagtacattaccaaggtccggccgacgcacctctacatgatgatgggccgcgacctgatcgaggtcgaccgcgtcccggccggcaatgtctttgccatcaatggcctcgagggccgcgtcatgcgtaacgcaacgatgtacgcctcttcggccaagggtctcgccgagggcgacctcgaccgcgcccaggaggacggctgggtcaacctcgcgggcatcatcatgacggtcggtctccaaggctttctcgatcacttggtcacatgacgttcgcgctgaccgactcttcatcgtacagtcggctcccatcgtccgcgtcgccctcgaacctctctcccctgttgacctgcccaagctcgtcgagggtctgcgcttgctcaaccaggccgacccgtgcgtcgagactctggtgcaggagaccggcgagcatgtcattctaaccgccggcgagctgcatctcgaggtgcgtcctttgtctgtctgtcccctgtttggtcgatagcgactgatcctttaccaattccttccgcccatcagcgctgcctcaaggatcttcgcgagcgctttgcccgaatcgagatccaagcctcgaagccgatcgtgccgttccgcgagacggctgtcaagggcatcggtcagcccctttgcgtcaatggtcttctcccgtatatgctgacggcccatctcgcatctcatcggctctgctcagacatgtctcctccgaagaccaaggacgcgccccgtgggacgatccacggctcgtcgagcaacgcgacggtcaactttacaattcgcgccgtcccgctgccgctggagatcacctcgttccttcaggcaaacacgagcacgatgcgccgtattcagctcgaccggcgcggtgcacgagttgatgccgacgatgagactgagcacgtcgcctccaagcagctgaccgaggccggcggcggcgaggagaagggcgccaaggaggtcaagcccgaggacttctggtccgagctcgagaaggtctgcgcttcagccggccgcgaatgggctggcgtcgccgaccaggtctgggcgtttggtccgaaacgtgtcggacccaacctcctgatcgaccggaccggtggctccaagaagctgtcagtccctccgacctgctcggttcctgaccttcgtcaacctgaccgagcaccattcctacagtctgcggcaacggttcgagtcggcgcttgatgcgccagaggacggcacgctcgacgactcggccgagtcaaaggacaacgatcgtctcctgcgcgactttgacgacagcatcgagtcgggcttccagatcgcaacgttccagggcccgctttgcgccgagccgatggtcggcatggccttcctcgtcgagagtgtcgacattggcgccgaggacgactacgacgcgcttcggtcgcgccttgcccaggccacgggctcgctcatctcctccgtcaaggacgcttgccgcgccggtctcctggactggtcgccgcgcatcatgctggcgatgtacacgtgtgacatccagacctcgagtgcgtcgccgtcgctcttgccgtcgctgaacatccctgctgacggcccccccccccccccccccccccccccccccctggggctttgggggggggtcacggcccttgttgaggacagctgcctgctcggccatcgagatgccgccgatcgtcaagaggacgccgaggtccgggtagcccgcctcgtgcaagcacgcgcacatcgccagcaggccgtcgtacgtctgccacctcgtcgtagaggacgaagacgcttggtcgcgcgagctcgaaaggcgccgccgtaggggcgagcccggccggcaaggcgacgacgtcgtcgagggcatctaccggcgcgcagagtggatcgacggcgagcgcaagaaggggcgggtcgtgagggaggaggtgaacgccgacggtgtcagagtcgagagccagtccgtccttgcaactgttccgactcgctctgcgctcatccgattgacgacccccctctcttccctggtctgcagtcaaccgcccgttgttcacgtctcgtccccgccgacctcgccctcggcaagcaagacgttcaacgccccggtcgctcgccgctcggccgctgcctcgccctggttcgacgaggccgcgcacgaggaccaggccaggtcggggagcgtctcgccggcggtcacagccgctgaggatgacgaggccaatccgtggaactgagagagcgctgtctggaatgagccgcccgtcgttgtatgttgcgtgcgagcactggacagcagcagcagaggaaggagggctgtggcgtcgcgcgcgtcggacgttggggctgctgcggacggccctccgggacggaaggccgctgattcgcgggttttaccgcgggccgcgtctcttttctggccgacgaagcggatcgaccactcgcttctgctcgaccaccaccacccaaagcaccttactctctgtcagtcgcgcatgtcctcagctagaagcagcgcatacggtcgaatgagagtcctgacatcctctgctcctgccctgtcctcttctgccactccgattcgcctctcgctcgctcgcccggctctcgctcgcatggctcgatcctgctccagctccctccctcaccacacccccacccaccctcacctcactttaagcaatgtcgttcgccgccggagacgctggaaagggagccggtcttttcaaggtgcgtccgtgctctttctgatccgtttcgagggctgggctgcctcgtcgggcgcaggcttccggcagagaggcggcccttcctctctcggccacccttcaaagaaaagggatcggagcagctggctgacttcttacctgctcgcctatgctccccgacagacccgttgcgcccagtgccacaccctcgagtcgggaggcccccacaaggtccgtcctttgaccttccttgctcgccaccgcttgttttctcgagcgccgcgcgcgctcgccaatcggggccgttggcttcgcgagagaggcccttacgcggccctcttcgatgacgcccccggcgcggcgcggctcggctcggctgctcaagggacgcgcctctgcctactcgctcgagactgaccgatcccttccttgctctcctctaggtcggccccaacctgcacggcgtcttgtgcgtccctccctcctccgccatcctcccttccctcgcctcctgctgatctcccctcccttcgccctcgcttacagcggccgcaagtccggccaggccgacggctactcgtacacggccgccaacgtcaacaagggcgtcacctggtccgagcagacgatgtttgagtacctcgagaaccccaagaagtacattcccggcaccaagatggcgtttgccggcctcaagaaggccaaggaccgcgtgcgtcgcccctccttccccccctcttaccgcttctctctttttctcttgcgtctgattcctcggctgactcccttctatctgcctgcagaacgacctcgtcaccttcctcgccgccgagaccgccaagtaaaaaagggattccccagggcgccttacagcctacctttttctaccactggatgagccgaccgcgtcccactcgcccacacacctttagatgcgggcgggatgcgtcgcttgattgaggggtcatttcttcaccccttgtgaccctgtttccccatgttttgataatacacactgctcaaacatctcttggtcgtctgcgagcgaatccgagagagtgcagttgggcgtctggcagggtgagcgttcgcaggcggggttggcgcgagcaggacgaggacgtcgtctctccgcgggcactcacgcccgcacccgcgctcgagccgccttccctcatgagtctgcctgccacagcgcacaaggctctccagtcaagcagctgctagccttccaagcgcaagggggtcgacgacgatggcgttccgtcggtcgtgccatcgtcgcagctaaggtgacctcatcgagccggccctccactttccgcggcgacggccggcggttggaacggccgccctagtcgtcctctccgaaaccgccatctcgcacccttctcatcatcagactcaccagactcgcatcgcaacatggtgtgttgctctgctctctcgctccggccgtctgctcgtctgctccggtcctcggtcgatcagacgccagacaggaaccacgtcgacctctcgccaccgccccccggctgacaccctccctcgccttcctctcagacaaccccgatctcgacctttaccctctcggacggcaagcagatgccctggctcgcctggggtaacggcacgggcgatgcgaagcagacggtcccgaaaacgctgccgatcgtgctcgacgcttttggaaagggcgcgcatgtcgatacggcgcaggtgcgggccgagctcgtccgtctgatgaagtgtgagatgaggagctgatcgatgtggtgaggggagttgttagaactatgcgacgtcggagcagacgacgggcgaggttttggccgaggtcaagccggagcggtcgacctactggctgacgacgaagcgtgcgtccgtcgtcgtcgtcagcgcaccgttgcgccagggcgagcggctgctccttgcgctcacccagagccacactgacctcttgcctttgcgctctctggcagtttcgaacccccctggcatcgaaggccagccgggagcgacgcccatcgccgtcgccgacctccgcgcctcggtctccggctcgctcgaccggctcgggacaaagcccgacctcttgctcatccacaacccgttcgtcgtcccgtctggcgaactcgagcccttttggcgcgcgctcgaggcgatgactgaggctggtgagccgctcgagggcgtctctctcggcgtctcgaacttccgtcccgcggatctcgagagcctcatggcgtttgcgacggtgaagccggtcgtcaaccagattgaataccacccctggacttcggtccactctgcgccgatcctcgcgctccatgcgaagtacggcatcctaacgcagagctacggaccgctcgtccccgtcctcaaggccaaaacgggcggcgccctcaagcccgtgctcgagcgcatcgcaaagcgtctcgacgtcgaccccgcgacggtcctgctgctctgggtccgcgcaaagggcgcgatcgccgtctcgtcgtcgggcaacgaggggcggattcggcagctggctgagacggcccggatgacgatcgacgtgctgacggcgcaggacgtgcgcgagattgacgaggcgggccgcaagacgcactaccggtgcgccctcctttcactcatcgactctcagcaggacgaaactgacgccctcggtcgactcgtcttgcgctacgcagtttctacagcccccacctggagaccgacttcccggcgccagacctgccggaagacatctgaagcgcggcgtcggtagaattgtatccagagttgtgagagatcgaaatgccgcttctgagagcctgtcggacgttgtgaaagcagtgagcagacggagctgagaccagacgaagacgagagcccgaggttgtacgcatgtcgaagccgccggcaccggagccgaacccgctttgctccctccgaacccccaccttgccctcaccccacgatgcccaccatcaagaagacgagccacctgacgctcatcccgatcccttcggcgccttcatcagacggaagaggacgctcggcgctgattgccttcgcggagacaaatggcaccagcggcggcgggggtggcagggtcgagctcacgctgcctcctgggacgagttggcggccgggcccttacttccatcaggtgcgggctggctcccaacgccctccatagcagattgatgctgactttcgtccttcggccgatggcagtcgcacgacgagctgctcgaggtgctcgagggctcgctcgccgtcagcttgaacggcaagcggtcggtcctccggcggcacgggagcatgcgcgtcgagaagggcgtcgtcgtcgactggtcgagagacaacgcagcggcttcagatgagacgtgtcggctggcgatccgctgggagccgggggagtgagtcgtattgcctgctgcttgcctgcctgctgcttgacctctcgctgacgcaccccggtcggtcgctgcgcctccctcttccgtcgctcttcagctcccgtatggaactctactggcggacctacgtctcgctgctcctccactcggttccgccggtcgcacctcagtccgacaaggtcgccctgccaccaccagccttcaagccgccctcgcgcttcagcctcttccagctgcgcctcgcccgccaagccgaccagtacccctcgccgacgccgtccatcctcctcagcccgctcacgctcgtccttgtcggcctcgtctggctctgggacatgttgaccgcgcagggctggagcgaggaggagcagatgggaaggggcgtgctgaggcgcgactgggtcccgcgcgaggtttgggaggagtgtgtcgaagggaagaagtggaggtagcggcgtcgactcggcggagcttcgtgagtagtctttccttccctcttctgcgagctacagctgaccggcttggagtattcagtcgaacagtcgccttgcgcccggctcgcctcaacaggaaaacggggctgcattccacgcccgacgctcatacggcgcccttcgtctgaggcgtcgctcagccagatcgccgacacagcaaatcctctcagccctccctacgctcgagagggcccgtctcaacctcgtgtcctggcgcgcactcgccacgaccgattggagtcaagcaacgcggaggcgggtggagaggggcttcgatccgccgaaatcagagcgaactggctgcacgtacagcgggcccgagtcagactgctgtatcgatgatgagcgtctctcccatgtcgtgccgaaagcaacctagcaaagcggaaggcgagctacggggagaagaagtcgattgctcggcgcgcagcacgacctttcggcggcgcgagccggaaagccttgtcctcgccttcttcacgacgaccaccttccctcggcccctcgagctttcaagccgacagctctcaaccctcgtaggtctaccccggcgcttgtctggtatgctcgagcgtctcagcgctgacctcgacccctgcgtcccccttcgaccggctgctccagacgctctgcctcgtctgccacgattggcgaggtgcgtccctgtcgctcgcaccgcgcctcttccaaagaccttctgtttgagctaaaaaaatcgtgaacttgtcttgcagacacggttcagccgctgctctgggaggagatctcctttggcaaccttttccaccctggcgtccaggacatggtcatcgacttcatcaacttcgtcggcgatgagccggagcgcgtccgacggacccgctcgttgcactttgtccactcttgcaaggtcaagggcacgcagctctctcggccattatcgaactggcgaacgccttttgcagcatcctcggctcttttcccgccttcaagcacctgacgctgctcggcccgatggtctcgatgtacgctggattgccgcctgaagaccggccccggctcgtcaactcgttcctgttcgacggcccgcctccccagggctcgcttctctcgagctttgcgggcgcaaagtcattgtgcctccgggacgtcgactggtacgaggacatcgacgtcgacaactcgcgcgagcagatggccgccgtgacagacctccagctcaacgacatccctcccgaaaaggaggcggcggtcgtccgacttctcggaagccgcttcggcgagaccgtcaagcgtctctcgctgccctgccggtccggcaactggcagtcgcccttctctctctttgacagcctccgcaacctcgagatcctccacttctcgctaaagcgcgagcccgacctcccgtaggagcttaaccagctcaagacacttttctggtacatctacaacctccacactccgaagggaaagcggcgggtgccgggactcgagaagctccgggtcatcgagacgttgactatccgggtaaagaagtcccaaatgggggagcagcgagagtggtaccattgggttcctaacatctaggagacgctaccaaaactcgtccgggggcgatccagtcagatggtggccggctagcttagggggaggggtcgaacgtgtcgggtcggggcgcaggttgctgggctgctgcgcccgcgcgcctgcctcaccctgtcgccccccttcgctgcctgtcgacgaccactaacgaccccgaaagcagcaagggtgtcaagagggtcagtgctgtcctcgctgtactgggccattgtcgggatgggcagagggacgggagaactggcactgattcgtctccgccgccgccgccttgctcctcctgcttctcccccggcctcccggtcagcagcatcgccctccgtctggtgctggctagcccctagcgatagatacgtccctgttggactcgcaccaggtcgtgccggcacgggatgccgagggggtacggccagggagccgagccacccgcacgaggccgctcgaacctgccagccggcccactccctcgcgttgccctcctccacggccatgtcgtttagggcaggcctggtgacagcctcgcaccctgtacgctctccaattgctgactctcggcctatcccccgcgcctcccccgccgtcgtccccagctcgcgcacggccgcccgcctccaacctttcccccggccgcgctataccctccattcgctcctttccctcaatccccttaaccatcacccttctcgagaactacgctcccagacaaagtctcgttatgtccaatgcaacccctgtcatgtccaatgtaagcaactatacatcctccatcctcttcgtccctctccctctccaacagccagctcggtcgacaccgcaaaggaagatggctccctgtggcgacaccaactctgacggggcccgacctcaaaatctggcgtccttgcaaaggcctggaggcccttcatgttgtccgtcgcttgtatgagtgaaagaggaaggtctttgatcgtcgtaagcgtcgtcgtcgtaagcgtcgttgtcatatcgtcgttagaagtacgcgaattcactggccgccgttgctcatgagccgctcgagctcgtccctggccgcccggaagcgctcgctaacggcctgaagcttgagcgggtcccacgtctgcggactgcgctcggccgcgtccttgcaccggtcggcaagcgcgagcgcgtcctgaatcgtcgagacgaggaccgaggccatgacgggtgcaccgagcgaagcgtagaaggcctcggccgaggcggtcgaagtggtcgcgtgcagcagggcctcgtccgagacgccgccgttgtcgaggtggtgaagctcgtggtgttgaccctgatgctgcgggtcgtcctcgccaagcggcgtcaggacctggtggaagaccgacgatggatcgctgttggacggcatcgggaagccgccggacggatcgttgccggaagcatcggccgagggcagcgagacatcgtacggcctatcgttgccggcagcgtcggtcggccggtgatggagcgtactgacgtggtgctggaggtcgtcgaagccggtcaagtgcgcgagcgtcgggtcgagctggccttcgtcgtcatcgtcgtcgccgagctcctgctgttgaacgtagcccgagaggtccatctcgtcggctgcctccctctcgccaagatgctgcgagccagccgcatcatggccgatcggatcgacaccgagcgacgagagcatctcggccgagagcgagccgctgccgctgtcgccgacaccgacgatgaccggcggaaggagcgcgtcggcctgccgctggaggtcgagctggtcgtcatcctgctcgtgcgcgagccgctcgcgctcctgccgcctcgagacccgctggtgctggctgagcttcttggccttaagcttgggcggcgcgaccgctttggccgcggctaccgccgccgtcgtaatcgcggccgggttgtggttatgccgccagcggtactcgacctgtacctcggccgactctttgcgcaggcgcatgtaaaccttggcaccgcagcccatcttgatcgactgctccatcttacccttgccgtctttggccttggagccaggaaacttgccggcgtggttgcagttgtagatcttggtccactcccacttgacttttggcccgcgcttggcgccggtcgccgtgctcggccgcgcgcgcttcttggactttgatggcggcggcggcggcgtctcggctggcgagggctggtcggtcgagagcgcatcgtcgagcatcgagcccgaggtcgtcatcaggccgccgacgtcgagggcgctgccaggcgagccttgagcggtgcttggtctggccgagtcaggcacgccgttagttgcgctctgctcagccttgtaagcgttttgcgtgcgcgagtctgacgagcaccaggaatggtcagcctcggtcctggcgaattgaaatgtcaaggaggacgcactgttggctcgatggaagtacttgagcccccaacgggcgtagacccgctgcgtctcgagccaggcctcggcctcctcgacgcaggcaaagttgaggtagtgcggctcgtcgtggaagctcgggaacgggagcgaggcctcgcccgctggagagcttggcgaggcaccggccgtgggcagcgtttcgtcagttgggggctcgtgcgatagttgcggcagctgcgacgacgaggcgacggcgttgacgtagccatcggggccagcgtgctgattctgatgctgctgctgatgattgtgctcctcgcgcaggagctgaagatgaccgtggtcgtgctgctgctgctgctgctgatgctgatgtgtctgccgggcctcctcaagctggtgttgctggtgctcctgggcaagctggaggagttgccgctgctgctcagcattgagtccgatgagtcggtcgtcgctgttgtcgtggctgacggcagcgctggcggcgaggagctgggcagtcaggacctcggcctcatggctgtcgagcaggaagtcgtgctcgtccatcgcccgaggcggtcaggagggagaagatgtgagaggggtgggctgagggtagtcagagcgcgctgaggtgtgtcagccttctgccacagcacgcggtcgacgcagggtgtcggtcggcgaaagaaagggggcggacactgtcgcgctggcttgctttcaggaggccgcctcgtaataggcggcgtgtacggcagtggtcgggaagagtccggctgttggcagccagcacgacagcgcagagcgaggcgccgggcgcgcaggccgacctctgccgccgccgccgcccctcaggattggccgacctgctcccagtcgggcatggatcacggctcggacgaatgaacatctataacttcgcgcctgctggtttctactccatgccaggccgagtgcgaaagaaagtggtcgtctgagactggcccggagtgacgctgccggtgagacgaagagggcgatcgaggtcgattttgtgccccggactttcagcccgcgcccctccgaccgctgcctcgcccaccaagcaccctctcgcttcctcctcacctgctcctcgcgctctcttgactttacaggccgactcctctgctcattggacggcatcatcgctctagcttgctcttcgctcgcggcctgcccttcaacctcccgcacccccggccatgacctcgtccgcgtcggcagacagcttctgttttgagggcccagagaagctcctcgaaatctggttcgccccgaccgaagccgagctcccggtgccggccgccgtcgatgccgaggacggcgtccggcggcgaccgcagcgtgacggcgacgagtggaagggcctgcgccaggtgccgcgccaggtctgggaggacatgctggacattgtccagtgcaaggtcctcagcttcgtcgagggcgacgagaccgacgcttaccttctctcgtaggtcctcgcagccggctagctcctggtatccctcccgctgacacactgccgcactcgatttctgcagcgagtcgtcgctcttcatcttttcgaaccggctgatcctcaagacgtgcgggacgacgctcaacctgctcggcctcccgcgcatcctctcggtcgcaaagacgtacgccggcctcgactgcgtctaccgctgcttctactcgcgcaagagcttcatgttccccgagcgccagacggggccgcacggctcgggctggggcggcgaggtcgagttcctcgacgacattttcggtacgtctggctcgctcgctcgctcgctggagacggcagcaggtcgccgccgccagctgctcgtcttcccaggtaggctccgcttccttgcactctggctgacctgaacgacctttttctcgacccgccagacaacggctttgcctacactgtcggcccgaccaatggcgaccactggctgctctacattacctcgccgcgcaacccgactggctcctcgccggcctcgccgcggaccatgtcgtcctcggtcgcgaccatcacgcccacgactggcggttcgcctccgcgggcagccaagtccaagacggctgcctacgccgcctcgtcctcggtcctcgaggacgccattgcctcggccgcgctgcacttcccccagcagcaggaggcctcggcctcgccctcgcgctccaactcggcctcgtccaacggggcggagcgcatggtcgaccgccggccgccacacgacgcgacgcccgtctcgtcggtcgagcgcccgctccggctgccgtcgctcggcgcgctcggtctgctcggcaaggccacggggggcgaccagacgctcgagctccttatgacgcacctcagcgcaaagggccgtggccagttctacccgccggcgcctccggcaggcagccttgacgacgagatcgatgggattgagggcggcaaggtcatgtcgtgcgtcgctgcttttgtgcgcgaggtctgttcattgacaagggcgccgggctgatccgtattcttcgcctctgtccaatcctgtagcgccgcttgtggccttgccggtctcttcccggcctcgctgacgacgctcgactcgtacgccttctcgccctgcggctactcggccaatgcgctcgtccggacgccgtcgtcatcgacctcgacctcgtccgagggctactggactgtccacgtcacgcccgaggaggggtactcgtacgcgtcgttcgagaccaacatcaccttcccgaccgtctcgactccggcggcttcgagccagcagcagcagcagggtgaagttgtcggcggcgagcggccgtttcccgacctcaagacggtcatccgcgaggtcgtcgacattttcgaacccggacggttgacggtcaccatgtttgtcgagcacgagtcggcgagcggcgccgggagcgccgacgacgaggacgacgaggagcaggagggcaccgtccgggcccgccgcctgctcatgaacaagaatctccttgtcggctactcgcggaaggacaagtgagtcggccgtgtcgtcatgcttcaggcctgaaggattccaccgctgacccactgcccgccctgctcgcgctaactaggatcctctactcgttcgagggctacgacctcatcttcagctgctttgctctcgcatgataccctttctattggtcttccgccctcgccgctgtcgaagggttctagtcgtgacagtcatcaagatacgaggccgagggctgcttcacaagtgaaccggacgccaacggctgaagaacgagacgcatattccgagatggcacgtcgtacccggcgcaaagtgcttgcggtcggagcagctgcaaaagggagaggcttgcgagttagcctagtccgcaggagacgctggaaagcaagagcagtacgcactcagttccgagggggtggctgctgttggccttcggggcaacgacattacgacgctgcaaaccgccgaccgggcgctggccgattgtcaagcgggccgagggtccagaaaagacgccgtgcaggcagccgccacacgactcgagttcagtctgggtgtcgaggcactgcgaatagcaagggggatgggtgagcctgccgtcgaagtcccgtcttagcaagagcgaacgcacctcgtagccatcctcggtgccggagactcggcaggcggtgaggctggcaggacagagcgtattgtcggccttgcgagagcggcgcacctcgacctggagctgacggcgagcgagaccgctggcctgggcctcgatcgaatgaacgaaaaactcgcgcgcatccggcgtcgagcagtcgatggccgggttcggcacatcaaggcgtgaaatcccgtagcagccgttcggctgaatcaggaacatgggctttggcgaacgaggctcacgaacggttcagcagagcaggccccgtgctgaagaaagggtgtgacacgcacatatttggctgccttcatggcgcaatcttggcgtgaagtggtttccccgagattgacattatccgaggtgaaggtgttggctgtcgggaacctcagtcgttagttgcctgcgcgttcagcgcggacgagaggagaggggagacgcaccagccaagcaggcggcgcccgtgaaactcgggcttccagcgtagggcgctccggggcacgttcccgctctcgtcgagccgcaagacgggaggcgggtgacaggtccgttggtgagtttggtggcggccgggctttcggcttggttctcggccggccagacaaagacctcacgggcgccgctcgtcttgcaatcaatggggccggccctgacatccagctgcgtcaagcagtagcacgagttgccgtcctggaagatcagcattgactgggaagcaagggccggctcagggtcagcgattcgaggcgagtgtcgtgtggtcggggcggtcggggcactcacaaagctcctggtcgaacagcgctcggcacaagtctgcctgctgaagccaccgccttggttcacgttgccctccgcgctgaaggtgcttgctggatgagcttgcagagtcgtcagccctggcagaagcgtttcaggtcggccaggtgaacgcacgggccaagcacgtcgagccggtccagaccgaggtgccgggcagagcgggatcgccagggcacgagccgtctcgaacgtcgccgcacggagggagacgagtctggtacgcggccgagaccagagcagacggctggaagaggctgccgagcagcagacaggagaccaacgaaaggagggcggcgtgcatggcgagcgtcaggagcgaggtcgtcgctcgaagggcagggctggccgggacgagaggcggtcagcgaccgaaggccggctgcagcgactggcagaaggacgcgcacctgcgagaggggtaaggggacctggtggtcggtgggaagaggaaaagcgacgtcctcgacctgttcaggtcgattccgaccggtccgtctgattcaacaggaaacggtggcgctttatattgacgccgggccggaggtttgcttggccacgcgaaacagcaggaaccggtagcctgggccggccgcttcgggcccgacgcgcagcacacgcttgccacttcgaagggagcgcattcacagacatcccagaacaaggagaaaaagggagagccaaacgaaaagggagcaaaatcagaagtgagaagagtgccggccgttggcgaacgagacgcagtcgcctcggtggcacgtcgtgccaggcgcaaagagcttggggtcggagcagctgcagagaaaggagggtccggcaggtcagcgcaggtcgccagaggaacagagagcccacgcactcgacaccgagagcgccgagggaagcggcctcgggagcaacgacgctgcgaggtcgacaggcgggccgagtgaccagagaagacaccgtgcaggcagccgccgcacgactcaagttcggtctgggtgtcgaggcactgggagaccgggcagaggggtcagctgtcaagtgttaaaggtcagtgccagcgagagatttcgcacctcgtagccgtcctcggagccagacactcggcaggcggtaaggctggcagggcagagcgagacgtcggcctcgagggcacgacgcttgctggcctggagctggcagcgggagaggccgctggcttgggccgccgccgagcggacgtagaactcgcgagcgtccggcgttgtcgagcagtcgacgtaaggtccgtagacgatgagggcggaaatgccaaaacacgtgtcgccgccctgaaagatgaacatggcctgggaagaaaaaggacgatgggctcagaccggagcacagaaggggccgccgcttactgcggtactcacgtcaccttcctctgcagcgagcttggcgcaagcttcgcggcgaagtccgcttccatagaacttgttgccgggcgcatcgtatccaccacctgcatggagcgacacccgtcagtcatccgcacgtactggggcgaaaggaggccagagaagacacactcggcaggcacgggacactctcgaagctcgggctctccgggtacggcctgccagggcaagtacccgccttgacggatccacacgacggaagacgggtgaagggctcgagcgagtggaagtagatcttgcgcgcgcccgacgccgtgcagtcgccggcgggtccatccagggtcacgtcgtcgaggcattcgcaccggttgtccgaagaggtccagacaaacatcgtctgagagcacggttgttttcgaggttcagcgcgctaggccatcggcttgcaaaccccactgtcgagcgggacgtacgcttcttttgcgataggagaggctttaatcgagagggagggattgttccgtcgtagagctggtgcggacaagcgcagagtaagctccggcagtttcgggggcgagtccgtctgtaagagagacaggtcgacggcaatcagtctcgattgcggtcaaggagctcggtcggcacgacgcaccgatgatacaggctgcgccgacaaaggtgctccttggttgtcccggacgggcaggtgtctgcggcggggtcgcaaggcgacaggatggcggccaccacgaaggaggacgacgaaaggagggtgccaaggaaaaggctggagatcaggcgaagggaggcgtgcatggcgagctgtgctggctgccgcgagcagaatgtagggacacgtctggactgaacgaggcggggagaggctgtcagcactcgagggcagcgatagtcgctcgcttgagctggaaaagatacggacgagggggaggtcgacggttgaggaagaagagcgaccatttgagtatcatagggcctttttcaacagtatcgaccgagcacgcggctgcttgttgtgcacggggaagaatcgacggtgcgcgcgcaagacacgcgcgagacgaacccgaattcggtggcctggtcctggacgccctttgcgcgctgcggccgcttcgcaaagcgctcgaccgagtcagtctccgatacgttaccctcagcacagaatcagcaaaggcgaggcgcggtgagcagagcgtcgcctccggaaattctcgctcaggcgacgggcaagttagcgttcgaatgacggacacgcgctcgtcaagctggtcgcgttgccgggtgcgaacgccggcgatcgaggcgcagcagcaaccgctcttatgccactggccgcgcagggggggcagcggcgcgccttcgactggatcaggctggcaaaggcagcgcatgatggcggacgggcggaagcaagggtgcagaggcgagggcatgagatcgcgctctggaccaaagcgactcttagcgacccttttcgaccgccttcttgagcctcagccggagagcctcgctcggcccgccgggaggactcgctggctcggcgctgacttcgacgaagcgggccgtcgtcgagctttcggccgagccgacaacggtcgagccgatgagcgtcggcagaggcacgccggtctcctcaagatcctggacgctcgcaggcgagggtgccgagggcggctgagggaggacgtagcttttgggaaagaggtggacgtgctcctcgaggacggcgagccgcacccagcgccggcggcgggtgaactgcagggtcaaagagacacgacgtcgttagtcgcgagcctagcctcgaatcagcgcgaacggcgagacgaaccttgccgagcccgcccttgggacccatgctctcccacttgttgccgccgtagctccagccggcctcgtccgtcagcgcgccgaggtcctcgacctccttgtcctcctcggccgggtacaaaccgtcgtctgcgccgttgccggcgcctgcggagcccgtcgcaccaagcgacatagcaaagagcgtcttgcgctcgccgccgtcggtcgagttgcgaccgaggctgccgcttgtagcgcgcgttggcgatgtcgaggcgttggacgcagaggcagcagacgggctgcctgcgctggcggtcgtgttggtcgttggagtcgacgagctcgatgttgccgacgcggtcgccgccttgagccgctcgagaccgcgcgaaagagcctgctcgccgagcgacatgcgcgagctcggactcatcgccgccggaccggccgtcgagccaaccgcgttgatctccttctggctggctccagcgggcagcgggctcgcgcccgagccgccgtcggcgttggcgactttggtcgggacaaacgtcgggcccttggggttcgagtgatcgaccgagcggaggaccgaccagtcgtcctcggcccagcgccaggtcgcgatccggacctcgttaaactgctcgttcggcgggtggggtatcgtgatcgtgtgcgaaggaggcaacgagaattgcggcggtggtgatgtcgggtgcaggtgggtgtcgcacctggcaaaggggaagtcaggatgtcagccagcgcaagcgagcgcaggctgcgacagaggagattgcgcaccagatcggccggtctccaggcgcgagcgtgctcgtccagtcgagagcgagccaccaacgctggttctccatgacctcgaagcggaagacgaccggctcctcgtcccactcgtcgtcgataggctcagccttgacgaccgtcgaggcgccgttcgggcccgtcgtcccggcgagcgtctcgggcgccgtcttcaacagaccgcgcttgattgtgccgaggagcgacttcatgctcgcgctccggccgcgattctcggtccgagcacgtgccgacgcctcgtgtgcgttgacgcttgagcgcgtccaggcccagcggaggaggctctcgttcggcgaccggccgtcggaggacgtcggcaccgcagacgggccgaggacgagcagcgagaggaacagccagagccgggtgcagaagaaggacgagcggaaggcccgggcgatcggcggcaggtacggcgagggcgagagaaggacgacggtgccgaccagggcgagcatctgtgaaggtcgaagggcgaacaggccgtcagtaagacgcccgcctgcatcacagggtttatatgttgagactcacgacgcgcacgcctaggagcaggttgccgacgacccagagcgcccagatgccgacgagcccgcgggcgaccctccaccagccgccgggctgccggacctcgtcgcggaccgagaggaaccactcgggcggccagtgctgaaagatgagcgtcgtgaccgccgagaagttggcgaccgcgacctggacagactgcgtcgacgccggcgcgaggtgagaggcggacgcgaagcccgaaccggtgacgatccgaggctgtggccggcctgtcgccaaggttggcgacgtcgctacgacgggagaggacgaccgacgctgctggaagcgagccgggaggaaggcgtcgaaggtcggcaggcaagggtagagcaccccaagcaggacgactggcgggagcaggaatctaaggggacgaaggcccgccgcagcagcagcgcgtcagcgacggccgacatcgagagccgagatcagaccaccctgcctttgcaccccaagagagcaggcgaacaagtgagggcgactgaccggaggacgatgctgccgctgaggcagccgatccaccaggcagcgaggacggcccagctccaggcccgactggcggcttcgcgccagagcaggacctcggccgccttgcgcgcccaggcgagcagcggggccgagaggatgaggaagcgcgtgatgtgcggcgggactgtcgacatgaggtccgacatggcctgacgagggccaggggctgatgagaggtcgtgtcggttgcgagcgagcgacgcgggtcgggggaccgggcgagagatctcaggaggatgacgcggcggcgggctggagagaagccggacgagggtcgtgctagtttatgttggcttcgacgagcagggctggctcgcgtctgggagaggacaggagacgtgtgcagctgatgcaagctacgtcaggccaacaggaggaagacgagaggaagatggaagtcaggagcaggaggagggcgagccgaagctccctccggccgagcgggagcggcgggtcgatgtgcggcggcggctcaagtcacatgctaggccgctcgtcgtcgttgcctcgatcctccttcgacagaaacgctggcaacgagatcgacaggatgttcatagtcatgattgcgtctgtgtggagggcgaatgcttcttcctaccccttccccttccgcacaggccaccgctctctccgccctcggtgccgcaactcgccttcccctgcgcagacggaccctagcccgacctagacgaggaacggaaaaattgccttgcggccctttgggaagcccttggccgcgccaaactccttcttgtacgcggccttcttcttgatggcccagaggaccatctggccgaccgagacggcggtgaagatgccgcctgggagcaggcaggagggtagggaggccgtcagtctctggatcgagggacgagccagctttgagtcggacgcacaggagaccgagcccgtcatgagggtcgtgccgatccagacgagcgactcaaacatatagttagcgcaaaagacggtgtcgaagccgtaaccggtcgggatcgaccgcttcttggtgccctcgggccggagcgagcgcagcgtcaagtgcgtgtagaagttggacgcctgggcccactgtaagggtaacggcagccagagagacgaccggggggggggggggggctcagtggtgcgcttctgggcccactgtttgggtaacgggagcctaggaagttgggggggggggggggggcatcagtagtgcgccgagggtgagcagtcgcgaccggaacggacgaggatgaagacggtccagaaggtcagccagccagggctcgacttgagctgcgtcgagggcaggtgtcgggccgagttccaagggccgtagaggccgagcgaaagcatgacgccggacagcaggtggtagtgcgccgagctgcatgcgcgagggagagcatcgtcagctctgaggtctctcgtgtagcagcccgttgcaaaaacgcacttcttgaagacgttgcggaacggcatcgttgcgttcgagaagcggtgaacgctgcgacggcgaaagcgagaagtatgggggtcagctatggccttacagcagaaaggccgggcagcgagtcaaaaacgcacgcgaccgtctcgtactcgcgcttgagaaagtggaacgtgatgagcgcaaaggcgacgctacaggaagggaccgcgcgcatgtcagcgtgatgacgtgggcggcgggcgcgtgcgggcggcgctggcaggcggctggcaggcagctggcgggcgagctcgatcaatggaacgtaccgctgcatgtccgacatctcgtagggcaccatccgctcgccaatgagcgagaagatcaggccaaagagctggttgtggaagaagaaaaagattgggtggatgacgaggggtccgagctagaacggagaaggcgtgcagggagccagatcatcagcgcagcctcctcgacctcgcaagagggcctagagtcgcagcagctgggacgcacgtattcgatgataaagacagtccgccacgagatctggcggccgaggtccttgaggtagacggtgtcctcctctttaacgccgtagctgccgagcgacttgtcgccgtcggcgaggacgctgttggcctcggtcgtcagccgctgccggacggcaatcagctgcaagcgggaaaacgagcagcgacgagtcagctgtgtccccttgcttaggtcggccctcgacgacggacctttgggaacttggcctcgacggcgcccttgagctcgtcaacggtgacggcgctcgggtgcctcgacgggaagtcgatctcgaccgcgggccgggcgggcttgccacccttcttcgacgacgaccgcggctgaacggtgatcttgaccatgctgagtagaggagtatgattgaggcgtagggtcggctgggagagaacagggcgagatggttgtcgagcgagggcagacggaggggcttgcaaggcaagtcgacctcgtttcgcccgaacgggtcgtcctctccacaaggctgacaaatcgtgatccgccccctttctcgctcgaccacgaccccctcgatctcctccccgacgactcttagatcacactccatttcgatctctccctctttacacccacaataacaggcaggcatgtcgtccgacctcaacgacctccgctgcaacaatctccggtgcgtcgggccgctctccccctcgcggcaggcacgcgcacggaccagaccccctctcggtcctcgtcgcatcgactcagcttgctgacccgactcttcctacgcttcaggtgccgcaaggtgctcggagaggatggccgtgccgtcgtcacaaccgtcaatcgactcacgcgcgcaccaggagcgagccacgcctgaccctcccacctctcgcctcgacccagtgctcccacattttctgcgtcgattgcgcccagaggctctttggcacgggcaaggagtgcccggcgtgttggtatacctcgccgcccagaggttatgtccggtcgacccctgacatgccgcgctaccctctgttccttcgcctgcccaggccagacgctcctgactgagcccgacgacgtcgtcatctgctcgctcaacccgtccaacgactacaagacctcggtgctctcaggcctggcgcaagtcttgccgcgaacctcgagcgtgaccggcgccgactgctgctgctgacttgcgacgcgtctcgttgaccaggccgccgctcgtcatggagatcgctacccggtgcgtccttctttcttttgaccaacttgtgaccaacaaaacgcctaggctgacctaccgacacagcgcgatgagcttctggcagtaccaagttgcgcaggagcagtcagtcttccgccctctcgcacgtcgatacgcggggtaagggctgaccccttcagggcgagcggacagggcgtttcaggcgctctacctccgcaagacgcaggaccacaattcggcgctcgagcgtcagcttcagatgggtgcgtcgggcgctgaccccgtagcgggcgtctgtctgaccccgcacgttcttctgcccatgccgcacagcgacgggtgagctgtccggtcagtgcctcctcgtcagctccggctccgcctgcatgcgctgatcctgttgacccctagccctcaaaaacaaggtccacggtccgtcctcgtctgtctgagttcagcgagggaagctgtcagctgacgccttgccttgggcctgcagggctcgagcgggacgtcgaggccgagaagcgcaagagccgcgagctggccgaggcttcgcgcgttaaggagcgtgagtatggcaagctgcgggcccagtacgacaaggtcagctcgtgctcctcgggcatcacgaagcgtcgccagctgacgacgatgcttgacgacatacgtagttgaagcgtaagacactcttgatgtcgggctcggacgcggcggccaacgtcgtcctcggcgatgtcggccaaatgtcgtccgacagccggcacggatccgtccggccaggcggcgctgcgttcatggacgaccactcggtaggggtccctcttccttttgcggaagagcaaagcagacgctaaccccactcgcgcgacagaccccgatgaagcagccgaccgtccaccagccgtggccgccacttcactcgccgacgccgccgcactcgcgcaccgtctcggcctcgtcgtctgcctttgccggcgccgggccgggctcgggtatccggccgtttcacccagccgacggcggcggcggtcagcgcggcggccagggctacccttcggtcgcaacgggcggacggagcggcgtcggccggatgagcagtgtcgcagctgacggcggccactggcagcagggcgctggagctccgatcggccgcggtcagtcccggcgtctgcggccgtttgctgcctggcctgatcgacgctgaccgctcgctgatgaacgggcagcagatggcggtcaacagcgccgctttggccacaaatagtgcccgccttgttccttactcgccagctctcacccccggtcagctgcgctcttgtcatctcgctcgtccccggtccgccttcgtctccgttcccggatccatgtatgcttacccccttcgacctaggcgctgttgtgagtatcctgcgtgcgacctgacccctggccaaggtcgaaagatggcgtggcgagcagcgctactccgcgaggaagtgtgttgtaagcggcgagctcgagcagcgtcttgacagcttgccagagggctggcggatggcggtcgtcagccggacgaggacgggctcgcatggatccgcggctggcccctgctgcgggagcagggactagtgctgacaagagccatgagccgaagtcaaacgccgcggaagagcttcttacgcttcgagcttgcgcaccggtagcccctggccctgctagttgcatcgagtgatgcgtcgctgcggactccttcgctcgaggcgtcctccggtcgagacgaccttcctctgcctcccctgcccttgatcacctccttcttcctctcggcctcctcagccatgccgcctgccaacgccgccgcggccgctccgtcggccaactcgaagcgccagcgggcgtgcctgctgtgctcgctcctgctctcgtcgtccgacttccggaagctcggctgcccaaactgcgacgagatcctccggatgaagggctcgtccgacaaggtgacaagctgcacgagcgcccagtatgacggagtcattgccgtcgtcaaggaaggcagctgggtcagcaagtggcagcggaccggtccgtttccttctgccctcctgcagcctcgcgccgtcgaccgagctcggctgcgcctggtcattcccctcctcgacccgcttgctgacctccgttcctccacgtctaccttcccagacaagtacgtgcggggcatctatgccgtcaaggtctttggccgcctcccggacgacatcattgaggagctccgcgaccgcggcttcacctaccaccggcgcgagtgcgtcgctctctcacacctgccgctcgcggcgaaccagcccgccggtcactcgagtgcagctcggctgactgactgtcccttgtcttacgtgccacccacagcatggtcggagacgactacgacgcataggaggcgacacttcgcttctaaaccttcgccggacactcacgcggccgcgcctcctcgttctcggccggccgcccgctcagtcggcgagatcgtgtccccctctcggctccagtcacaagtctctctcgcatgccacgctgttctctggcatcattcgcagcggcacgcgcacctgcgatcgtgccgacgaggaccgacaatcgagcgcgtcggaccagtgtcgcccacccgtcgccgctctgctcttacgttctcccctcaacctcacgctttctctcactctctcgcttcaatcctcttcccgtcctactccgggctgtaccgactatgcacccccttgaccccttctcgacatcctcctcgcacgacttgctcgagcgccatcttcatcgcccgactggtggcggccagtactctggactcgcgctgacaggtccctgcgggaccgcccacctcggctgcagaaggagcgttccaccgaccgccgcagccgctgacggcggccgatagtccgccagccccatctgccgccgtcgtcggacgaggtaccagctcgtcccgaccgctgcgagacaggcgagtgccaggccggcgagcaggccggcgagtgcgcgtttggcgggctcgcctgcgcggtcgggcaaggagcgaggccagggtgggatggcggtcgagagtgcgaggagggtcgtcgagacggggactggagaggtgctagctcctggaggcagcctcgaaagggtcgacgacggtcgtgcagtgccagccggagggggattgtcgaggactgacagcgttgacgagacgaagaacgacttgtagagcctcgtcggcgtggagcagttggtccctcggtccgacccagtctgcgcgcgagcggcagagcatggtcagcgggcttggacgcaaagaccgcaaggctgccaaggaacggacataggtcgggagaccccagctgcaaggcaggaagcgaagcggtcagtgcaggagcggcgacgaggcgacgagacggcgagtgtccctccgcgctgagcatgcgcacgtcatgttgagcactatgttgacctcaagcccttccgttccaggcccgacgagccagcttgtcgtttgatcggccctggtatcgagtcggacagtgcaccagccctctggatagaccggcggccagaatggcgagaatggcggctccatgtcgagcgtgcccatcgagggaaggacgatgacggtctggttcgggaaggtgacgagcggcgtgatctctctgaagaggcctggtagaacagctgagccgccgatcgacgggagaaggtcgagccatccgaaggtgacgttttggcctggtataaggaatcaaaaggtcgtcaatgggactggcgaggtaagacgcgagccgacaggggttgacttcaggggactgaccaactcgaacgcgcggcgagcgagggacgacaaggccgatcacctgcggtaacgagctgggaaagacggcttcgtcgtctgagctggcaggggtggcctgccggcgatttggcagctcgagctgcagaggttggtcgaccgtcaggctggtccaagctggagcggacgaggtaaccgagaggctgacggatgcgacagcggtgtctgaagttacgatcgagcaggagagaagcaatgggagaaggaagcagcagggaagacctcgacagggcgccatctgacgaaggtctgtaaacggggtggcggtcggaggaagcaaagcagggcccctgtgattcgagcagctgccttcaccgagtcgctcggtctggccaggcagagcgcaagagtcagcgaaagaagcgtctcaattattatccccagctcagaatgctatccttcggacgtcttcctgtccctgcggcaggaccgagcccgtggtcgacccgagcgtcgacggctgactggggggaaggctcggaaaggggcaggccatgtgccgttttacgctcagtcacacgccaggctgtaaacgagctgcccgccggtcgacgacgacgacgggctcgagttcgaccgctcccctcccttccgtccagcaccgacacgcctccctttagcttctcgcttcccgctatggtccttccactcctccggtcattgcgatcgccaatcgtcggcgcccttttgcgtcgctcgctcgcaacgccgacagccgcgccgctcgaggcttcctcgtcctctgccgccgcgaccgccgccgacgctgggcgcgtccctggcggcccaggctcgggcagggccggcaacaagctctttgacgacttcgactacgacgagacgacggccgagggccatgctatgatcgacaaggagcgcgatgcgctcgccttcatgcggacggtcgagctcgagctgccccggctcgttcgtgcgtccggcgaccgcccgctccgcaccgaagccatccctggtcgaccctgaccgccgctcgacccctctcctgcagctattcctttcacgccgccaaacgttgatgaggagtttctgagattccacacgaccaagacgtggccgctcgaggaggagtcaccagagccgtgcgtcccgctgtgcagcccgggctggcctctgcgcccttgctaacctctcgtcgtgccccgctgtgccctgctcttttgcctcttgccctttcccctgctgccgaatctttaggacctgggtcacgctctcggccccgatcgctcgcctgccctttaaatcaccggcggccaagcacaagttcctgctcctgatctcgcccgactactaccatccgttccggccatccaacttctcgctctcgcacgtcttccactcgacccacgccaatcagccgcggaacgaccgggcccggcatcgtgtccacaagtcggcccgcgagcggcacgaggccgaccaggtgacccagtcgtcgctcccgccgacgctctactctgagcaggcgccccgagtcggcggccacacgccagccaatgtccctcaccctgccttcaatcgggcgaccggccagtggtcgaccggcttctaccgggtcgacgaggaccgcgagtttacgcgctcgcttgccgagcgcgagggcgaggacgccgacggctggttcgtcgtccggagcaaaaagttcggctatcagctccagaacaagaagtggtgtgtcgacacgctccggcgactcgtcgaggcggccaacgtgagtgtcgctgctttgcttcattgcactccgcatgatctgcgctgaccgtcttccgccctgacgcttgctcccttctgcaggaccaatcggacccgatgaccgacattccgctcgacacttcgcccatcacgacccagttcatgctcgagaagcgccggccggacggcacgcggccgtcatggaaggacatgccccgggcctgggcgtttgacgtccccgccgagacgcccgtcacgcgcgagagccctccagtcgtgggggagcggcaggagtcggaggcggcccaggagtcgagcaccgcaaaggtcactgcggccgagtgagggcacgagcgccgatgcagatgaagtactgaagcagacggccgttgaggcagcacttgtgtgaacggcaggtgtgcgacaggcgaggtacagcgcacgtatgcctcagagacgcgcaacaggttgaacggcacagaaagcgtttcgtccccgcccctccacctttgaccggcgctctcctaatgagtcgtcaatcgcattgcagacacaagcggccgacggccgcgtcactcgccgacagccaaggccggcaccgagcggttgagcaggacgatgttcgcagcagccggcaccggcgaactgtactcgacgcggaggcgccgcctctcctgcagatgccgaagcagttcgaggcccgggtcggcgttcccagggcagctagagctgagcggcgcgaggtcgagctgcaagacggggatccactgaccgaaagacgccgccgcaaaggcctcgagggtgaggatcggttttgggtaggcttggccgtcgggaagataatcggcgtcaaccgagagccgcagagcgccgacgttggagcgagatcttgcagaaagcaaaagccggcactagcctcctcaatgaatgcccacgtcgggaggctgaagacgagctcgtccagtggacagccctgatcggctttggtaagccggttaacgagccaaggcaaaagcttgcggagcgagctgctcaggggaaccgttgacgaatggttgttggcgacctcgacgaggacgattgcttccgagaaataggtttgtctggccgtgaaggagaatttgaccttcgtcagtgttgcgatggccgccgttgctcgattgaaagcgcggacgagtcgcggcatgtcggaccagtacaatctggtgttatggaggtcgcagcagcccaaggtcaggcggcgaagcttgatctgatgaacgataagcgtgtcaagatccgtgagcgaggcgttaaaccggctgagtcgacgggggccgaccaggtagaggtcggcgtagaggcgagcgaagagcgcgtcgtagaagccgcgcgaaatggagaggagcgacgcgtcgagccagctgttggcgtcgccgacgaacgagaggatgtgccggaggagctcgtcaatctcagacaggctgcgtgccaatcgtcgtcgagcgaaacgagatcgggtcagcagcggtcctgcagctggccggacggtcaggaagggggagctaggcgcatggcgtccgtctgccggctagcggcggggtcgtcggccgtcgtcgtcaaggctgccggacggccgaactcatccagctcgcgcgcggcggcgtccgggagcttgaagctaaaggcgcaagcgggagtcatgctgtgttggagggggtcgagggagtcgggtcaagggagtcggcgacaagaaggacgtcttgccgagacgatggttggcggacgaagatggtccgcagcacgccacgagctcgacacggcctccttcaccctcccatcgcctcgcaggaccatgaacagcagagccgactaaaatatccgacgcagtaccccttcctgccttgcttccccccactctctcgccggtgtgacgaggtgcgagagatcaaaggacgccacgcttgcgcgactgctttcggaacgtagcggagggattcctcctccgcatcctctgacgggtcttcctccatgcgaaggagcgcagcgtgcggtttgacggctcgcgcgttttgatgaaagagggagggaaggcgagggaggaattacgcggtgcagcgcaagtctggctagtgctattcgacgtgcttcgtcgccatcgctcgcccggcctcgctttcgcgagccaactcactagctttgggaccagacaaccccccaccgcagaccttcccgacctttgtcagctcatcgcgcaagccaatcagccggcaggaaagaacgaatgacacacggccatgcatcgtctctcgacccatggcctcctcccacacaacaccactacgcaacacagcccgtttgtccgtccgcctcacgcagagagagcgctaaggaacggcccgacttcgccagagagacgaaagtgcgcttggggattcgtacgacgagcgcgtgcgagagaggcctccatttgtggaagtcttggtccgaccgccgatcgactgcagagaaagaaagagagagagaagaggggactgggagcggagatgggaaggggggtcgggggtggtggtcggagccagaagtgttggccgggcgcggcggcgagagtgtaaggtttacgctcgccctcggtaactccgagtacgcttctctgcagtgtttggcgcgggtcctcttgaccgccgacggcgacggtcgcccgctccatgctgttgcccctctgcttgacgcccgctttcttgcacgcggacagacgggctgtatgtagcgttggcatgcttcaggccgtgtctcctgctcgcgaagaaagggacgggtcaggccatgatcctctggaactgcgcgaaatcgcccccccccgcaaaggggaacagagcccgagacgagcgaaagaggcttctcggcaggcttcgctcgaccacacaacgagagcctgcgacggccggaggcgaccgtcggacgccctcatcccctctcttctccgtcaatacacctttgctgcccaacgtcgaccctctggccagcgtccgatcctcctacccatccatcggtgcgtcccgctcttgcgagctcagcccagctgccaacctcctctccgccgtgcgctgacgtgtgaggcatcccgtccctccgcttctcgcctccgccccgacgacgaccaccagtcagcctgcgccgccctcctcctcccttcaacctgtctccccgcagcggccgaccccttcgccccgcaacacacgaagcccgccggccgtcgtccttgtcccctgtcctaaaatcctacgcccacgcctggtcggacgcctcctcccgccgtctgtcgccgtgccagctgctcctcctgctcggctgcgagcacgaaaccctccacacgactcccaccctccctgtcgactccctctcatcggccaccctcctacatccgacgcccgcagccccgtcgtcagccgtcctagaagcagcagattgtaacggggccatgcctgtcctctcggccgcatcggcggcggcggcagcggcggcggaccctaagctcgtgtcgacagcagcggcagcaccgctggcagccggtcttcatccttacgtctcggatacccacggcgagcaacggctgcatcggcaggagccgcgcatcgtctcgctcgacagcgaagacgacggcgatggcgacgatgaagagacgcggctccagacgggcgacacctcgctctcggacgggtcgacggccggcaagctgccgagcctgccgagcatccagtcgctcctcggtattccttctggtacgtcctgtcgtcctgttgcgtgctcattgcggcttgtgttggcgaggttcggacggcctcctggcgagctggctggtgtcgctctcggcgtaccggaagcagtcgttgcctgcctcttggccgcctcggtacccatcctcaccctgctttcacgaactgacatcgtccttgtgtcattatcgtcgactgaacagatggcgatggcgccgaatccacggcagatcaacgaccgccatcggcctcctcagccgaggccgagctggaagcagcatctgcggtaaggctcagccggcaggctgcctacctgagccccggccagcagcacccgcacccagcgtccggcatcccgccttcggccctcgagcagcttcaacacggcggcgggcgctggactatagcgggctcgttcgacggtcggtcgtcgttctcgtactccgagggctcgacctcgaccgaaggcggctcgcgcgtcaattcgctctcctcggccggctccatcgcgaccggctatccgcacgggcaacatgcgcagcatcagctgcaccagccgcaccagccacacgcgctcgcgcagggctcgtcactcgcctacccgtatgcgccctcggagcctgagcaggtcgcgccgcctcccggtggcgcgcccctccagcgaccgggcacgagcggctcggccagcggcagtggtcctccaagaactggcacggccggaagcttgacctctggctcggctgctggccctgtctttggcctctcgccctcgaccggccttcctttcggctcaggcggcggcggcaactcaggcggaccggtcggcgtcacgactcggccgacgaccggtggtagcctctcgtctgtccgacacgtgctcggcggcgaggacgacgagggagcgttcgatggcggctcgcctcgcacggcctcggcctgcgaagcagctcagccgtacggcgcgcctcacccatcacatcagcagcaaccaggcggcgacggctttgcctaccacgggccggtcgaccatcatcagccgttcttctacgcaaatcatccggagcagcaccggcacgagcacctcgcaccgaccgggctgtactcgccgacggccaccgagccgctgccggccagggcgggcggcccctctctggcgccagaaggcgagactgctccttattgggccactggtgcgcctactcacccatccggtagcgcgcagcggttcatgcggctagacccggtggcggcggatcacttggaggcgccagctgacgaggtcagtcactggggcgccgacccagccttttcggctaccgccccggatggcccttctcgaactgtcgcgccagcgcccgagcagtacgagtacgcggccggcttcccgtcgcaatacgagttccagcagccggcagagacgtacccggccccgcagtcgtacgccgccatccagcagcagcaacagcaacagcagcagcaagaacaccagcagcaggctcatcagcgtcatcagcgtgaggcgcacgatcgacagcagcggcagcgcgagcagcaacatgcccagcagcggcagatgcaggcgctttcgctcgattcgcgccatcgccagcagcaccagcagcatcaacatcagctcgaacagcagcaccagcagcagtgggcgaccgcatcggcatcagcctcgtcgactccaaattcggtcgttcctgggcctcgggtctatgcgccgttgcctcagcaggccgccagcaggctcagtgccggcgagtcgtacgctcagcgattgtgtgcacaagatgagtacgctcggagggcctccatgcctgtccgactgccgtctggtggcagcagcggcagccgcctgccgcaagcggatccgttcgatggtcacaacgcgcccggcgccggcgagccgagacgagggagtctgccgagccggacgacgcacgacctctgggcgcagcaccaacatcacctccagcaccactcgctccagcatcagcaccagcagcagcgccggggctcggttgcatcctcggtcgcttcgggttttgcgacgatcgacgaggacccgtacggcgccttcggaccactccagcaggaagccgtctaccctgctcatacggatcctcagcaggcaccgtatgagtcggtcttccagattggcgagacggacccgcccgccccgttcccggtgactcacgctggccgagagccgaacggcgggttatacgactggtcgcggggaggtagcatccagcagccgcacagccagcaagtacctcgggccggcgagctgagcgtcatctacggctcggccccctccaatgttgatcgccggggcagccagggctctatcatcgccggcccgccggccgtcggcgctgctccccctcaggggccgtgcgagctagcgcaacctcaccctcatcggcacgtccaggccgagctgtcgagctactcctttacgccccagcctccggtctcgtcgcacgcaactgctccagcgtcgcacggcgccagccactatcccctcgcggcaccctccctgtacgccgttcagcagaccggacacccgcagtacagcttaccgccgcaacagcccgtcgctccgcctcagcaacacgcgtcgtggtcacagccaagcgccgcttacggaccgccagaagcggtcgccggcccgtcagctcacggctgggatggcctccagcagccgcaccctcaagacggctcgcatccgcatccgcatccgcatccgccgccgccgccactgccgccgcctccgcttgctccgcagcggcagccagacccggcatctgtccgtcgtctgcctgcgccgcctccgcatcagctcgaacgcgtcgctgcctacccgccttatcggcgcgagtcgatcggaggaccaccgtacgctgcctcggcagcgacggccggtgaattcccgcagagcgtcagcatctcggccggccgtcgagcctccgagtcggccgcgccgtctctcttctacttctcgtcgtcgtcgacgccaaccccgaccccgatggtgagcatgccaccgatgcccgcgtcggccgctggcggcccgtccgcagctcttggtaccagaccacccttgcctaatctcgctggcgaccggcctggcgtcccgaaagccccgccgtcgtcgtcatcaacggcaccggcggctgcccgtccgccgaatcgctccgtcggcaaggcgccgacgggcaagtcgatgtctgccggcgggagcggcatcatgcgcaggcgcgagacggccagctggaaggaggccagatacgactgcctcatctgcggcaaaaagttcaaccggccctcgagcctcaaggtccgttctgcaccgatcgcttcctctgcagtgcctcgccagatgctgacggctttgccatgacccagatccactcctactcgcacacgggcgagaagccctacctttgcgacaaacccaactgcggccgtcaattctccgtccagtcgaatctcaagtacgtctggcgtccttctctggcccgccgcaatcgctgatcacctctttccctcgacagacgtcatctgcgcacgcacaacaaggtgccaggcggaagtcgcggccggcgtaagacctcgacggcgcacgccaacgctgccatcgccgccgccgtcggcaacggcgcctcgacctcgacctcggctgccggcgccgctgccgctgcttcggtcggtcctcccggtcggccgcggggcgaggccggttggagttcggccgagctcggcggtgctcgctcgcaccaggccagccgcaatgacgagcccggagacgacgaggaggacgatgacgaagaagacgacgactttgacgaggacgacgacggcgagggcgagaatgaggacgaagacatgtgacgccctccatcacccaccccacttgacgcgccgatctcacaactgtataatattcccacactggctggcctcgcaatgttcctctttctctcttgctgtatcccttacttttccaagcttctcttcatctgcatcctctctctcgcatcggatcagtctctcacatgctgtcctgtctctgagagagcttggtggatgggcgacatacatctgcggggcatgggaagcgacggagggcatgacgtgaggctggagtacatgtgcggagaggggcatgctacaggatacagtagtggagtgtggcacgtaaagtggagtggggatcgaagaacggccgtctagggggctgcaggagaaggtccggcggtggccggaacataaaagaaggcaggcggacgagatcaagaagaggtcggcaatcagtggaacttgtggtggaccttgctttcgagctgcaaaacagcaagagggcgcaagttagcgcgacgctcgaatgcgaagaaagcgaatcaggccaaagacacgacgtacctttgcgttctcagcttgcagcttggtgatctgccgtcggaggttctcgatcaggtggtccttgtcgacgattgtcaactcgagcgtctcctggagcgacttcttgcgtgcgcggaatgctcgggccgagaccttgtttctaaaacggggaaagggcgggttgcaaggaagtcagcgtgaattcgactggtaagcgagaaggagcgcagaaccgacctgatctgccgcttcttggcgggtgtcattcggtcgtacgacttgcggctgattcccatctcctcgaggacctcggcaatcgtcgtgctgaagtagcgacgcgatgaaggtcagtcacacaaatcagagcagagcattggaacaatcgagcggctgacgtacccctttccatcggccgagcgaacggcgccgtccgagtgctcgctcccggcgcgctccatgcggactgacgtcgtcttgaccgggtcgagcaggaggctgaggtcgccccgctcgctctcgtcgacggcccggagatcgtcaaacgcgccgtcctcgctgccggtcggcgtgtggaccgagaagctcgaggacgaggcagagtcggcacgctctgcggcggccaaggcggcggcggcctccgcagtcgacgttggccggccggccgactcaaactcgaagagcgaggccgtctggcgagatgctggcggcggtgggctcgtcgaccaaaacgaggtctcatcctcgacgaccgtcagccgagccggctgctgctgatgctgcggtgcgaatgctggaagttgctggccaaagaaggcgccggcctgattcgactggaggaggccgtacgagtaggccatcgaatcgggcaaagcggtaaagtagctgccgtcggtcgggccggcgctcggcgagaggggcgaaggtgcaaagagcgagggtgagaagagggcgggcgcaaaggacgaggccgaggacgacggtgtcgacgagctcgtcgatgcctgcggctgccggaggtgggccggcagtgctggtggcaggcctaggaggtcgggagccgagaaggacgaggtggagagcccgaacggcgaaaagggctgctgcgcgtaaaaggcggtcatggcgcgaagctggctggtggtggtggtggtggtgatggttgattgggatggagagagaaagagcgtctgatcgagggcgttctgaccagatgtaggatggagggccggtgggaacggatgagtggtcgggctgagctcgccgagggatgcaaagggggcggccgagggccgggcggcgggcgggcggcggcgagaggggagaagcggccagggcgtggccggcggccggggtcgggcttcgggctgggcgattggtgcgggcggcggaggtcgcttggctttgattgtccgtggctgctcgacgagagggtagtggtgtgggaaaagggaagatagtctgcttgagagggctatatgcggtccgttttctgattctcctcttgcttccctctgcctcctctttctcgttgctcggtcggtcagccggccggccgtcagggtgcgcccgacgacgacgggcagccgcgaaggggatgacacgccggccgtttgaccgggcgcccgatcgagggcggccgcagacctccaccttttgcccctgctgctgctggctggctctctgatctcccttccgcgctggaaagcgaacgggaggagatttcgcagagcgtgcgggggcttggagcgtgcactgtttctcccctcctgggcagcagcggttgctcagctgagcccgcttcctggcacgatccggctcgaccggatcggttactacgtcagagccaacgactgtcgtcctggccttgcagggaccagaggagcgggttttcgcagatacagacgctacgcgctcgcggaattgcgatggcagtgctgcaaggggaagcatgggccgctactgctgtcgccctactgtcgagggcatgcctgcagaggtggcctccgctattccgatgctgccctgaccgaccttatccgcgcatccgaggcgacgaacggcgatatggaagcagaagatgcgcggccgacgacgaggccgagcctccgctgcgggagaagccgctcgccccttggttcctcctcttctccccgatggtctctgcccgtcgccggtcgaacgccgacgcgttgacctgcccgagctgacgtcccccgacgggctggccgtgcgcccatctgactctcctgacgccctcctacacctattctcgcactcttctcgacgcaccctccgcttgacacggacgcactcgaacgagccagtagtctgcggctccaaccttgtctgctcgggctcgagcgatggccgaacatcgtctccgagctcgcgcgggggccgaacgaggaagggcgagggcgggcgcccccggccgccgccggctgacctctcgtaatcagcaggcgactcacccatctctgtcgccctgtcagcgtgcgagagagaggaagcggtgccatctcccagcacgtctgcctctcgatggctcgactagctcgcgagcttcactcgagctggaggaggttcaccgtgcccgagcctccgcctctcgtcgctgctgagctggatactgaccccgaccgagaggcgttgcctctgccttccctcgcagccccgcgctgccgtctccgctccttcggtcgggaagcgagacccgtagcgatgacgcatacaaggcggacgatcgaccacgtcgcccatcgtagcgcacgatccgcctggcttcgctcgtgcgcactttgcgcctctgtcgcggaggtcccgcagagtgcgttcgctcatcggaggcgcatcgaacgacctcccttcacgtccctcccccgccgaccgccctcacgcttccttcgtgggacgtccacaaacgctgacgagtgtctgcgtgggtgcgaggcgcgcatggctcggatgcaggcggtctcgctaacggtcccgacggggtcgagggaacgtctgtcgcaagagccgcgcggctctgctccagacgtcaggcagatgaggaggagggggaggaggggctggcgtgcctcttctcgacgcacactccttccgagctgacgacgcactttgaacgctcgtcgacgagctcactggctgacctgagcttgcaacaggatcaacatcgtttcaagagcgtccaggatgggctctggccgccgactgctcgtcctgcgctcgctcgcatcgcgacgcaccattcgaggtgaaggttttgcgacgcaggcgtcagtcggccgttcgggaggcgttcaccgacgcctggcgcaacggccgctcgatcaccgagggctgcaagggcgggtgcatagtgggtcaggaaaggacgggtcgtcgcccgctctgcgatctatgcgatcttatacgtgtagcgacgacgactgcagtcgaggcgacgtatgtgtgcctgcctgcccaggcagccgtcgtcgtctcaaactccgcccgaccccggccaagcgacgcccgctggctcgcctcctccaacactcaccgtcacccgttccctcctcaaccacgaaatcgacagcaagagtcattatgcccgccaagatcgccgtcctcgtctactctgtgtgcgtccgctcgatccctcctgttggccctggcccggtccggccgagcgaccatctccgcccgtgctgcgctgacggccagcgacctcgcccgccctgcagctggggccacctcgacgagctcgctcagtccgtcatccagggcgcacgcgaaggaggcgctcaggtcgacgtctaccagtgtgtgcttcggctgcaaaagcgctgactgccaggcgcactgctgacgatcccctcgcccggctgatctctgctcgcctcgtgcgccaccaggtttcctgagatcctttcaggcgaggtgctcgttaagatgaaggccgcgccgaagccccagtacccggtcgtcaagccggccaacctcgtccagtacgacggcatcttcatgggcgagtctgtctttcgccgccgccccttttgcggcatgtatgcgctgacagtcggaccttcctttgctttcgtcttcaggctttggcacccgctacggcgctcggccggccgccgtctctgcgttctttgaccaaactggcggcatctgggccaaaggcgagttgatcggcaaggtgcgaccttcgcgcatgcgcctggccgcgtgcgctttgcgctgacctgcaacggcccttccctccccaacatagtttgtcggcatcttcactgggacggcctcgcagcatggtggccaggagacgacgcagctgacgacgatccgtgagtaccagcttttcttcttcgtcttaccggctgggtcgaccacgtgctgacaggtcgcaacgcttgcctcagcgttcctcgcccaccaggggatgatgtacgaccagatgccactcttgtcctcgtacacgcgctgattttttggtacgacctccctgtccagctttgtccccatcggctacggcgcaagcgagctgaacgatgagaaggagatcatcggcggctctccctacggcgcggcctatgtcatgggctcctcgggctcgcggggcgtcagcgagtcagaccgtcgcgtcgccgtttaccagggtgcgcttttttcttcgctttgttgccgctacgaatgaggactgctgacctcgtgctcaccttgtcgccctccaggcaagaatttcgccgttgtctgcaacacgtttgtcaagggaaaagaggcgctcgcgaccgaaggcatcgctgccctggatgcccacggcccgctaccccctgcggccggcgacgaggcgcaggagagtggcaagtaggctgttactcgtgcccgcgaggaccgacgggcggggccgaaggagcagtcggcagggtgcggccagtgcgatgcgaccctcaccgtagtatgcgaccttcatcactacatctctgtcaactttgtgaagcccggccgaggcttgtcacccttttcggcccagcatgcgacagctgtaggcttcgaggcggcctgcagggcgctgctgcgccgccttaccgcgcgtcgacaagcgcccgtcggcccccccttgactgtcttcttcaatgcggctgtccgctcagcaggaggtcgagccgtcatgagaccactcagctcagtctgctgtcccccagccgggacttggtgctgaggagtccaggccggccactaacctaagcgtgacgcgtgacaggaggccggccgaaaacgcccagcatctcggcagcggcggcgcgccctttcaacgcgctcctcttcctcccgtccaggacgcctttctcttgcaccttcaccttcaccttcttgctgccttcttcattgccatgctcttccttctcggtgcccttctcgcgtctctcacgcttgctgccggtccgtctttcacctccctgctcgaacgtcctctggcttggcgcgcgcagcacgagccgcccccgtccgagctgccgcctgcctctggttctgcttagactgacagccctttcgtatttcctctccttcgcgacgcactctccgcactcagcccagcagagcttctcgtatcaggtccgtgctcgagccttgcagctgccatggccacagtgtcagccagagctgacgcctcccgctcggtcctgtcagggctacctgccaatccttgcgccgacgtccgagaacggctgggttgctggccagacgaacgtcctccagtgggatggtgagctcgttctctttcacgcactggctcgagtcccagtgctggctgccggcagacagacggcggcagcagcgccaggagagggcggcggcggagggctggccgccgcgcggccttcgtgcgagttattggctgaccacgtcgcttcttcgtctttgcctacctcgtcatcagtcggatggtcggccatgaagaacggacttccgccgtcgtttgacattcgggtgggtccactcaagactcgacctggcttcgccgagcttgttcaacgctgacgcgcttctacctgctcgctctgccgctcccccccagctcgcccaccccttcagcatggtgcgcaggcgacgttctctcgatttcattcgaacctcatgctgatcaagcgacacgtcttcgattcagaacccgccgctcttcatcgcgaccaaggtcgaccgggaggacaagtcgctcgccgtcttcctcgacggctcggtcccgaccggcgacggcttctacctccacatcagcgacacctactctggccagatcttcgcgacctcggatcggttcaacatcgccgccgccgacagcggcacccagacggcgaccggcctcccgaagcccaaggcgacagcgacgctgagctccgagaatgacaacccggcccgatacgcgacgacgctcgacgggaagccgctgccgacatttaccgattccgccagcaagaaggtctactacgccgcgtctgctggccggcctgtcctccacagcggcctcgtcggcccgctcatttcagcgttcgtcgccggtgtcgctgcggccggagcgctgctcgcctaggagcctcctcttgcgcgacgctggtcaccgctgcctgtcggaccctgctccttctctgccttcctcccactcccggtccgccttctacagccgacctactcattctcgcatgtctgtgggccagaacgacctgttgttgctcctcgatgctcttgctgacgtcgtaccgggcacaaagagaggcaatattggcgcacaatcacgtcgccgaggcacgatagaacggacatcgaagatggttgcgagcaggaagaggctacggcgcaggataggggtttgcaacagagcggctgggcagggagggacgtggcgcgaatgaagaagggaaggcaaaaggcgaaacacgggtgcaacgggattggcgagaacgaaagggggacgatgcgcgagaagcgaaagaacgacgaggggggcagtggggacgacacccgctcacttagaggacatgcggctgatggcaaagacgccgacgatgacgataccgaggaagccgatcgaggccggcaggatgaggtccttcgagatgccggcgacgagctcgccctgagggacggtcgctgaagtgtccttgacgtgggcgtgcaccttggccggagggacgagcgccggctccgacgccggctcgaccgacagcgacgacagcttctcgtcaagcgcgggcgtcgacaggccctggacggcaaccgtctcggcctcctcctcctcgagactcggcagcgacgactgctggggcgcagccggcggcgaaagaacggcagccggagccggagccggggcgggagcaggggcctgggccttgatggcggcctcccacgacttgccgcccgagaggacgaggacgacgcggtccgtcttctgcgagcgcgcgaccttgaccgaatcgacgacgtccgagtcgttcgtcatgtgaacgaggtcgccgtcgtcgtctgtgtagctgagcgtaaagtcttccggaccaggcgtgatggccggggtctcgtcctcggcggccggcgcggccggtgcaaagaacgggtcggacgcgagcttgccgacgacaatttcgcggaggttgtcgagcatgtcgttccgggcctggaagcggtgcgtccggccgctcggcgtcttgaacttaaagacgtacgtgccgtcgtcgacgagggccgacgccgggggcgcggtcgagctcgccgggccgcgggcaccgacgtcgctctcggcggcgccgaccgcgctggccgagtcgccgggcataacctcggggatcggcgagttggcaaatgagtcgttacggttgtggagcggcttcttgggcgtctggagcgtcgtcgagccctgagcgtgtgagccagagttcaccgattgggcgtcgtcgtcctgggcggcgccgatcgactcaaagaacttgccccacattggaccgccaccggcgtcgctgccagagtcgccgttcatcgtgccaatctgcaaagggagacttgaagtcagcagaggtcgcgaggcgagaggtgtcggcctgcgtggacggacctgctcgagcgtggcgtacgtgagcttgaggacgtcgacgatgccgacgagccggccgtcctcgacgacgggcaggttgaggtagtggccgtctgagcacacaaagcaaagtccgcgaggtcagcgttgccccccaatcaactggtctcgctgccacttactgtgcatcttcttcagggcgtcctggacaaacatcgaaggcggggccgtgtccgggtgaggggtcatgacgcggacgaccgagcatcgctggctgtcgaggccagcagcaatgacacggaggacgacgtccttactggtaaagataccgacaatcttggactggccgccgatgacctccatgacgcagacggccgtcgtccggcgctctttcatgagctgggcggcctcgcggacgctcgtccgcgggctgacggtcgccggcggcttggccgggtcgaggatcgtcgtcaggtcgggcagggccatcttctcgcggagcgactccacataggcgagcattgccgcagcctgcgggttggacgacatgcctgggccaatctcagactggacgccggcgagcgcagccgagagctgggccgaggccgacgagccgcgctcgaccttggcgagcgcctcatggaagaccttggtgatgtcgagcaggccgacgacgtcgccttcctcgttgcagacgggctgaggcaaggcgcgagatcagcactcccgaatcgcagttgtggtgcccggtcggcagctgtgcgacgcaccaggtggcggaaaccgcgcgagaccatcaactggagcgcctcggtcgccgaggtcgtgtcgcgggtgaccatcgggttcttggtcatgatggctgagacgggcgtcgtccgaggatcgaggctctcggccgtcacgcggaaggcgaggtccttggcggtgaagatgccgctcagtccctcctcgtcgtcaacgacgaggacgcagtcgctccgcttggcggcgcagagctgactggcatcggcgacgctcatgctttcggggaccgtcagcgccgggctcggcttgaggccggcgaccgtccccttcttggccttggacgaccgcttggacgactgggacgactgctgctgctgctgaccacctgtcgacgggaacgtcgtcgtccgcttgcgcgagagctccgactcgattttctttcgaatcgcctgcaatcggccagagatggttttgttggtcgtcggcgcagagaggggcgtgacggacgaatgggagcgcgacagttgcgagcggtagcgttgtcgttgttcgcccgacgaggtcgacgtgcgcgattcgagcgagtcggttttcgaccggaccgtgccgagtgggtcgaggtcgccatcgtcgaaagaggccggaggtgagggaaacggcaaaggtgcgggcgtcgaggcgtatttcgtgtgagtgggccgaggaggaggttgatcgtccgggaaggttgccgacggaaagacgacgggcgaggtgtcggtcgaggccggaggggatgcaagggaagcagaagaagggaggagctgtgtgagatcagatggatcaggatgcggatgagggcggcgaggaggcggcgggcacgatggctgaggcgatgggagtggattcgtggggggacgggagtcgcaaggaggtcggcagatggagactggcagtagccgatgaggcgtgttcgaccagctctctcagttggaaacccggtgcgagctacgaggcgtgcgtcggaggggaagaagcgaggcaggccatcgcgactgactcgcccaggtcgacgagcagaccaggatccgccctatgcagcatggctgcagattggctttttgaccaggatccagcagctccagaggcccctccttgcgttggaagaaagcgagaggcagagagacggtcgcccaacatgcccctccttccctccagcccctgtcgaccaagcagacaggcgcgcctagccagcgggcaaacggcaagggggggggggcaacgtacctcgtcgcgcttgctttgctttgcgcgcgtgctcgatgcgccaccggcgggcgagttgacggccgagaggggcgagtcgcgaccggactgggagaaggaagacctgcgaaggagggagggaagggaggagggtgcgagcgaggggaggtagttcagcggcagttcgtggccgttgtggctgccggctctctgctcgaccggcctggcttggaacgcacatgttttgctgaggagaggccggtacagggattctggacattgaccgaagggggaggaaggagcgggtggtgggtcgagagcagagagagggggttgggtgatctctctgcttggacagtcggcgcgtccaaggcgagaaaaagaaatcaagggtcggtcctggtcgggcctctctctgctttcgctctcttcgccagcccttcgctcgcctgtccccctcagctcagcttcagccgcttcttgggcagtcattcattcggtcgtgctgagagagagagggtgaagggatcgaggtttgcaataaagggtaaggcaggcaagggagagcacaacgaagcgtctattccttcgtgacctccaccggcgcgctggaacgaacaagaagagggccgttagcggacgcaggcaagagggcgacaacagcaggcgatggcaacgcactcggttgccttgacgtcgaccgactcgtcggccttcttctcctcctccttgacggcctcaaccgcagccggggcggcgacgacgggctcggcgttctccttcttctcctcggccttggcctcctcggcgttgatggcggtgctagtcgagctctcgatcggcgcaggcgcaggcgcagaggaggcggcagcagcagcaggggcggcaccgctcttgttggcctcctgcgcgtcctcgaaggccttcttgaagaggccggcgtctgccaaaaaggtaggccggtcagaagagggatgcgagtagccaaaagaaaaatttagactgactgtcggcgttggcgaagcggatagcgagcgtctcctgggtgggctcgccctccgagacgtcggcagcgacgttccagacccacgagcggtccgagccgatgttgggcgaaagcgtcatgtcgccggtgactgggatgcgcatgaaacggtcagctgcagtcttcaggtcggacgatcgcagagcgaaagaaagcagggcacagcccgcaagatacgcactgacgtggttggcgcagaccttgagcgtcttgtcgcgccgcatgacgagccggatcttgcccgactcgggcttgaggatcttggcctcaccagtgccgcgctccttccactcggaagaggccttctcgaaacggaagagcttggcacgcctgcgagaccagacgagacgagtcggaacgagaacgtcagcagctgctgcccgtcgagccgatcaaatcgatggccgtcagatgaggagcaagagcagagacgcacatcttgaagatgacggcgtcaccctcctctccggtagtgacggcgacctgctcggtgagcttgtgcaccggctcgaactgggggtcgacctcctgagagcgcggcgcatcgcagaaaggagcaggacgtcgaaggcgggcgagaggcagaagggattgagcctggtcagcatgctgaatcggtgacacgagcggtcccttccgccaggttcatcctcgacgacagcaaacggtcttgcggagctactgtcgaggcagatgcagacgaccatcgtccggcgtgttgctcggccccgactctgacggcgcatcgacctcgctctacctgagcgtccagctcgcgtccctctagtctacgagcggaccagcgaccggccacttctggccttgacggacgcccaacggcccacgaccattacctgcgaggtgagccgagctggctgtcgagctcgagcccatccccgagcaggcgaacgaccttcctcgcgcggccgagcccagaaggtctcctccctctcggccgtttgcgaccattcttggactcacaggggcgttgttctcctcgtcggccattgtagatgagcttgcttttgctggtgaagagggtcgggaagagggtagagaagaaagcacgagggcaaggaggttgtagtcgagcacacgccgccggccgtttttgccgggcgctcctgatggcctgtgctgagctggcctggctcgccctgctaacgacgacctagctgcctctcgccctcctctccctctgtccttgctctctctcggccggcctacctccttgacaagcagatctcgccatgcccaaggtcatctcccgggctgccatctcgtcctcggcagacggtgcgtcgtcgcctcactcgcctcccgcgcgcgcgcgcaccttcacgcgcgtccttcagctgacgccctctgcatctgccctggttgcagcgcccgagacggcgacgcagcaggccgtactgaggacctacttctgtctctgcggagagtttctcgtgcgtgtctcttcccgtcccgccgcggccccatctcaggccggctgatcctccagtctccctccgtctcggaccgcagctcgtcatcgacaaggacctcgccaagctgcctcgccggccaatggacaatgcctttgtcgtccgggccaaggcgcccgagagcaatccgtcagcaccgacgcgcgtcttcaagctcaactcagtcgacggcggaaaggtgtttatcaagcggtgcgtcccctaccctcggccgggcttgcgctctgggatgatgccggcgcgctgacctttccttcggcggtgctcggacctgcgtctgctccagagaggacgaccagctcgagccgcgctatctgcatctgtgtccgcgatgcgcgacgccgatcgcctaccaggcgacgcccccgccagcattccgggccgccgtcgtctacctgcactacggcggcttcaccgaggcgcaagggacggtcccgccagaggcttgggaaggcgaggacgccgtcgcgatcgagtagtgagggctcctttacggagagttgcgcgacgagccgatccctagaggtcgcgcgacccatgtacgagtagcctgccggtgcatgttgtttctctagcgtcaagcgtgcgtcctgctctcaaggctgacagccggcgtcagaggaggactcaatagagggcgacggggcgctcgtcaggccgcgagcgaccgcttgcgacactgcccgcaactctcgcccgactgcagtaatcgagtgggtcgcagactgctcattctcgaagacgctgtcaaagttcccatctgggtcgccgctgcgtgccgaaacaagagacatgacaatgcgcggagcagatgcaagggggtgcgtgcgggtctatgagcacaggagatcgatcaggctggcgtggcgtcgagggtgggatggggcatggggtgggttaatgagcagtagagatcgaagagttgagttatgtcgaggaaagggagggaaggagaagcccggaggggcgcttgaggctgtgctatgggagacaaggggcaggaatcgtgatgaaatctacgaggtgagcagtcagccgatgtgaccctcgctggatctagcgagcgaaggggacgcacctagtgttcaaaggtccaggagaccggtgctacgccttcgatggctgcggcatcgtcgttcatcacctcgtcgtcgcctggaagaactcgctcagccgggccgtcgttaaaggggttgtcgaccgggtgcgagcacgagagcgattcgagctggagaccgagcacgttggacggcgtcgtgccgaggacggccggttgaccgctcgcaaggctctggaccgacgggaagaggggcgagggcgcaccgctcagaacatgcttgggtggagccgtccgaaagaggcagtggccctgggccgtctgcgaggcaacgaggccgaggacgctcggcggtgaaactttgacgtcgggtgcaaaggtcgggatcctctccacctgcggcgtcggggggcaagcgttggtcgagacgggcggcgtaaaggacgagtacatctcgttggccggatgcgcctcgggccggccgagtggagtgctttctgtcaaaggagagcgttgggcgtcagacttcggcagacggctggcaacaggaggactgaccgttgtccggcctgtcgctggtcatcacctcatcgtcgtcgtcgtcgtcgaggaaggacgagacccagctgtgagcgtcgtcgtcgtcgacatggccgtctgacccgccgtcgctgtctgcccagccaagcgggccggagtcgtcgcgttcgtcgtgctcgagtgcagcgttgcggagctcgacccgggcaatacgctggcggagctcgaggttctccttcgtcagacgcgtattgtccgactgcagcgaggcgatcgtgtccttgatgcggtctgccgggcgcgcatacagtccacccggaggatcagcttcgaggcctcgaacgacagcaacgagaggctagacgcaccgcgatagcgctgctgcttctgccggttcttctcggccgcactgaccgtcggcggcgggccggccgagacggagctcgcagcggtcgatacggacgagactgaggaggctgacgtccaccgggtcgacgcctcactgctggccagtgtcaacggacggcgggcggcaggcgccgaggacggaccggcgagcgactgcgagcgtcaagagaggaggtttctcgggtcaggtcggttcgattcaaggtcctggcagggtaagacggaccgagccgaggaagatgcttgggctgaagaaaagagcaagattgagcgaggaagcaggaggaaggcgcagtcagcaggggtaacgaacccgacccgtcgtgccgacgactctgccccagcctctcgagagcgactcactcggtccgagtcgagaggcctgtagtcggcgtcgtcgtgccgagctttttggcaagtcgagctgtcagtgagagaagcggagcgagggctgagcaggacgagcgaccgaccgcatacggccggcttccgagggcatggttcgcgggcaacggcctgccgagcggacggaggtccgggctgagagaccgttagcggcgggtgtccgcagccaggtccgcccgagcctgtcgacgtaccggttgctgccatcaagattgcgcgagcgtgtccggtcggcggtcggcatcgtgcagtagagcaggaaggtaggtgatggttgggagggagggagagaggaaagcaaggcgagccttcctttatcagcaaggaggcaggaggctgaggagatacgctacgccgcgccagccaccaacagcccgtccgaccgagcgcggatccggtgccttcaacttgccttcctttgcttcccccacccccgcacgtgaccgtcgatccttctagggcctgttgagctgggagcagcaggcacaagtgcacggggcgacctcgcacgagcgacgggtttgagcagagcgagtcgaggtgcgagtgcgcgaagcgggcgctcgacaagggaggggaaggaggcgcgtccaggggcggagacaggctcggcgagcgagcgcaaaggagcgcccgctcttcgaggctgactgatcctccttcctgcggaagaaggacgcccgctcgtccatctcgccgagatatggtgcactcgagggctcgttcgctcggacgcccgagttgccagcccgtcctcatcgtcagcagcagcgcccggtcagccttcctctgggttgaagtcagcctcagctcgctacctgattcggaccagacgtcgctgcaaaaggaggcatgcctcatagcgctcgcgcaaagcgtgtcacctcctggcagccctggtcgcctcgcgtgcagacaaacgatcggtctgccgagggcgcgcccgccgcgagcgggataaagcacttgcggtcctcgctgagggatgcgggaggcagagagtcgacacgggcgtcagtgagtctggctgcgaaggaggggcgacgagcgagggtcgacgagcgagggtcgacgcgacagacgcgccgcgctggacgcacggatacgggcacgggcagtcctgcggcttgtcgacgcaggcgagactcgacgggcacgtgtagcggtcgcaggccactgcgtcagggtagggagcaccctgcgggtcagctctggctaacggggagcgaccagagagatgggcgcaccctccttgtgcagctgccagccgcgctggctcgcaggcggtccgtcctgctgctgctgctgctgctgctgctggtaatggtgctgttgaccgccaaacgggttgaagccgccctggccgaacggaaactgagcggccgcaaacggcgcgagagcgagacccaataaggccaagagtgtgaagagccgaagcattccgagcggagacgaggtcgagggaggagaggtcggcgagccggctgcggcccgaagtgacgagcaagatcctgtcagctcgggcgaggcctcgaggtgactttcagacgaacgagctcgcacgtacagtggttcggagcaatgtcaagcggtgctcaaaaaagagtgctgaagagggttttgaggtctgctgctgacgagggttgggaggatcactgggcgagggcaagaaggaacaagtcgcgctcgccgcctctccctgccctgccctgcaacgtccagcatcgaatcgcctgtttcctttccttctctgagctccacaagcatgcctcgctcgccctcacctcctcgccgggacgaccgtgacgaccgctatgctcgggatccgcgggacgaccgctacggccgaaacgaccgggacgacgcgcacctctcgaggagtcgccgcgaggacgaggaccgcgggcgcgagggcaactcgagccgggacaagggcaagaagcgcgagcggagccgggaccgcgagcgtgacggtggtagcagccgacgggagcgctcccgagagcgggatgacagacgggacaagaaggacaagaagtgagtgccggcgatgagcagctcgacggctgcgaggctggaagggggggttgggacgaggcgagacgggctgggcaggccaccgccgaaaatgccgggacatcgagcacgacctggctgaaccgcttgaccactcgcctgtgcaccagacgccatcgctccaagtcgcccggccacaaggccaagaaggaggccaaggcggcagcccggcgcgagcgagaggcggccgacgcccggacggtcgccgagctctcaatgtacacggcgaccgacaatccgttcaacgacgccaatctcggctcgcaattcaagtgggtcaagaaggccgagaaggagaagaaagccggcatgtcggccgaggagtcggcccggcgcgatgtcatccggcggcaggaggctaaggtacgccgccgtacactcgagatgccgcctcgactgagcacggtgagctgacgccctgactcgtgccattcaaaacaggaggagctcgagcgcctgaacaagaagcgggccgagcgtgaggtcgagcagcagctccgggaggaggaagatgcgcgcaacgcccggctggccgagtcggccctgatggacgaatggatcgccaaggaggacgacttccagctcgagcaggcccggcgtcgggcgggcattcgcatgaaggagaaccgtgcaaaggcgatcgatttcctggccatcaacctgcgctttgcccagccgtggaagccagaggagcagaaggatggcgaagacgacggctggggctgggacgacgccggcctcgagatggacatcgaggagccctaccggatctttgatgtgagtcgcgagggtcgctctcccttcgccgactgagcgctgacgcccatgaaccgccagaatctcacgctggccgacaccgaggagctcatggccgacatccggctctacctgacgctggagaagattccgtccaacatcgagttttggaaggcgcggccgatcgtgtttctttgcgtcccctctttgctcaggcgctaacttccctttttcccccttctgcaggcgatgcaaaccgtctgcaaggcccgccttcgcgagctgagcgtctccgaggtcgaccggatcaacccgcatgtcgaggcagagatctccaacctcctctcgggcaagacgctcacccagctcgagcagctcgagatctcggtccggctgaagctcgagagcggcgagccggtagacaccgactactgggaggccctgctcggccagctcgaggtttggaaggcgcgcgccaacctgcacgcgatgcacgaggtcgtccttcaaaaccggcttgagcagctccggctccgccagagggaggacgcagctcgcgttcagtcggacgtcgccgcgctcgtcaaccccattgctgccgccgagcccgaggacctcgaggacattgaggaggaggatatcgaggaggaggagactgaacaatggagttcagacatggacgccccgctcgtcaacgccgccaagctcacatacgaggacaagagcgtgccgcaggtgctggagaaggacgagatgcgcaagctcgtgtgtccgcttgtgacaacgacccttcaagtcgccgcggctgaccacctccgcgctccccggcccgtttgcagttcgaaatgcggcgcaaaattaccgccactcaatttgtgccgcgctcgagccggccaaccgtcgacgccgggcccgacatttccgcctcggcggccgatctcgaggccgaggcgctctaccgggccgaggctggcaagcagctcgacgaggacgaggagatgttcaacattgaggagggcctcggcaaccggcagacctttgcctgggaggacaagtatcggccgcgaaagccgcgctacttcaaccgcgtccacaccggcttcgagtggaacaagtacaatcagacgcagtacgtccctcgcggccttgcctggtggcccccttggccgctctgacgtctcctctctcgcagctacgactcggacaacccgccacccaaggtcgtccagggctacaagttcaagtacgtcctcagctcgaccgccctgccgaacgccggggttgggctgactcttgccctctgcgctccatagcatcttctacccggacctgctcgataaccaggtcgcgccgacgtacaagattgtcaaggacaaggtcgagcccgagattgcgaccatcatcttcagcgccggcccgccgtacgaggacattgcgttcaagatcgtcaacaaggagtgggagcactcgcacaagcgcggcttccggagctcgtttgaccgcggcgtcctccagctgtacttcaacttccgccgcaacttctaccggagtacgtcgctctctcgcccgcgcgagccccttgccgcgcgctccctgacgctgatcgccatttcctctctcctcttgcgccagaataacggtcccatcgtctgttctccccgattacatgtggcattccttgaatcgactcaggctcttcgccccgtttctttacttgcgcacaccgttgggctgccgtttcgatcgcctcgagcgccgctgcgccgggagccgactcagaagaggcgcgcgcgcgtgacgaacgagaatgaggtcgacctggcccttgccttgcctctcttcgtcgcccgagtgtcggatgaactcgcgagcagagacagacgtcgggctgagcatgctgttgtgtaaggtgaccccttcccttctgggtctcggaggggacgggctcgctcggccgtctgattcgtcctcgggggtggctgctgcgccggcctcatcaagacctctgccgaagcgagagcgccctgcctgcgacggtcgacgacgaccgggccttggacgacgccctccctcttccttgacactctccgtcacccatccagtcgacggcacggcagcaggcaaggcgaccgtctgtcagaccagcgccatccctagccagtccttcttcaggcggcctgtcgccaccgaccgcgctatgaggagctctggcctcccctcgagcttgctcgcctcctggctgctgctgctggcgctcctccttggctcgaccggcacgctcgccaagccgctcaacgtcaccttgacgccctgtagcggcacggcctcaatcgcgggcgacttcgagaccgccatcgacttcaccgtcggttttgcccagctcgtgccgaacgaccgcggcgtgctcggccccggcggccagacgggtagcaagctcctccggatgaatctcatcgggacgaccggcgctgtacgtctgtcggttgaggcgctcccttagtcactctccctgaccgcctgctatttgacgccatgcttccaggccatcgaaggcttcgacaacacgacgaacaagctcggtcagtccccccttggctggctgcccctggctgcgaccgccgaccagctgacaccgtccttcctttgcttgcctcacccagccacgctgttcaccacgacgaccgtcctctcggcgcccgtcatccgctcagtcagctcgctctgctacgcgctcaacacgaacccgccgacggcccttccggcagaaaacccgacggcatgctcgatcccagccggcgacgtcgctctcaacctgacgctccctcttcacggcggcttcccgttgacgacgctccatacgacgatccggatcgtcgacacggccttcccgaatccgaacgtgctcagctgcctcgagattgccgttacgccgtactacccagacggttggtactactcgtttatcctctttctcccggcgagtcttgccgccgcctactggatcctcctttggacggcgcgatgctttgcgagctggaccgctgccgtcgcgtccgacgttggcgcggtcggcgacgcccacggccaccgcgggaggaggaaacgtttggcgcggatcgaacgcgtctggagccgcgtctttggcacggccgtcatgagtagcgccagcggcgacctcctcgtgtcgagtccgagtttactccgtttcggtcggtgccgcgtcgcttgtgcttgtcccttttgaggccatagccggctgacgatgcaccccctcctgtcttctgatcgtcaccgcctctgggcgcgcagtcacgcctggcttccgcgacatcctctggcacattcagtggtgctcggccctcgcccagctcgccgtcgactggccgctcttcgtctacccgatcgccagccggggcgcctgggcgtcgctcatcggcaatgtcacgctcgtccagggcgccgacgctggtgaaaagcggctcgacctcctcgcaacgcacaacgcctacgaggcgccggtcgagtttgcgagccaattcaacgacactggctcgccgctttatctcgacccgactgcgccgaacgttcttctcaatctcgaggcccggcgcgggatggagtcttgggcgaacgcggtcggcctccgcggcgaagacctctttggcacgagcgccgccatttttctcctcgtctgcgcggccctcatcgtgctctcgctcgccgtctggacgatccacgccgtcatcgagtatgccggcacgcgacagcagacgagcgagcgcggcatcgcaacgccgccgctcagcccgggcatgttcggcgccccactgcgcaacctcgacgccgcggcggccagctcgagctctggcgagctgcacgaaagcaccggctcgatcaaggacgacgcgccgcctcaggttgtcacgctgcccggcgaccatgcgcctggccggctgaagcgccagtggtggaagttcggcgttaagggcgccgtcggcgtcttctacgccagctcgctgaagggtgcgtcaagaatgcgcgacgtccggccgctccgttgctgaacttcttctccgcaggcaacctcatccggctcctgctcctgttccacatgccattcaccgccttcacgacgtaccacttctacctcgctgcgacgacggacgactgcacgcttggttctatcgtcctcgcggccgtcttctttctcgccgtctgcgtcctcgcgccagcctactgtgcctggcgcatctgcacggtgccgtccggcaagctctatgacgctacacggacgctaatggccctcgggccgctctacaacctctatggcgagggccagcagcgctacgcggccgtcctgctcggcagcagcctcgtcaccggtctcatcgtcggcgccgtccaggcgagcgggacgacgcaggccgtcctgctgatcgtcgtcgagatcgtcatggggctcgtcaccatgatctggctcccttggggcgagggcgcgagcatgggcgcaacgacgttcatccttggcgtcttgcggaccatcacgctcgtcctcgtgcttctgttgacgcccgcggtacgtccaacctttgcagagacgttctttcccggaggctgaccccttcacgctccgcgcgcttttcaggtcaagataggcttgccggccggctcttggatcgcctacgccatcctcgtcatccagggcgtcatctttctcttctacctgctcctgctcgtcgtcaagctcatcgaggccgtcgttcggcttattgtccacgctccctttgacgagtcgaccgacgaatttgactctggcctcctcggcgccttctccaaggcgagctgctgcggcgagggcctcctccgccagagcggccggcgacgcaagggtcggagacggccacggggcgtcgctgggcgcaaaaaccggcactcgacgactgccagccagcagggcatgcttaacgccagccagagcagcaccgtcggcaagagctcgggcgagctctacggccagtttgacacgcccggtggctacgagccgcagatgggctactttcctgagacgcccgacgccagcttcagccagccgggcggctttatcatgggcggttggcgaccgccgccgcccgggccgtacgccgccggaccgaacgagtaccttcaaatgcaggagcgggggccggctcagggaagcgaaggcgatgatcgatcgccactccagccggccgaaggtgggctcgtccggagcttttcgaaaatcaggggcggcaaggcggccttcgagacgccctacactgttcaagcgacgcccggcagcaacgacggccaacgctcgccaggacctaaccagccactgctttttgcgccagacggatcctcgagcagtcgaggcccgcaacggaccggctaccggccgccgcctttcgctcccttcccctcgtcctcgccgcaccctcatccggcggcacccccggcggatgctcggccgagcaactatgtccgcaggaagagcgagacggccgtcgtcgactttgccaacccgccgccgcacttctaccagggcggcagtgcgatgccatccttctcacaggcggcacacgcagccggcgtcggcgcccctcgacgccatcagcagcctttgacggcagccttcggtcacgacgaagaggagctcggcgacgacgacgatgatcggagcgcgtacgactctgatgactcgacccgaggcaagccccagcgccgatcgtggttcctccgcaacgcaagcaagaacgacgtctctggttccgaggacgactcggttcgaaccccaacgaccgccggcgagaccgccccagctcagtcgtcctcgcgctggccgtttggcaagcgcggtaaccggccgagcacagagagcagtcgacgtgtggtttcggaccaagtgccggcatctctagcggccgaggcgctgcctgtatcagtcgagccggccgcgcccaagagcttctcggtcattcggccgaaccgaccccagcaggcacagaaggagccggcggcggcggcctctggacacacgcccgcatcttctcgcggcggctcgaccggcttcagcgtcaaccggccgccgcgagggccgaatgtgatggccgatggaggccttcctccccagccgctggacgggccggtgccgctcggtccaaacgccccccgctcgccggtatcatcgccaccgagccaccagacagaccgcttcagaacctgatctctcgcactcgtcactcgccacgccccctccctgtccccgcggtcattgcatcgtcctctcgaccagtcccgttcacgccccccttcccgcagatgaatcaaacaccgtctgctgtcgctaaaatagctgctctttggctctcgcactcccgaacgattgcctctgtgagagcccctgatccttccttccctccctccctctcttttgactgctattccgctccgactgtttttcgcctgtaccaacgcgccctcgaccgccttcttcaatgacgcaccttctcgctgcttgcatcctcgaggcggcggcgagcgcagggccacagtcgtcgtgagagcgttgcaggcgccaggtcgtcgagccatgcctgacgaggcaaaaaagcaaggacgagcagcagcgatagagggctatgcgagagggtctagcggaggataagtagcagggcatgcgtccttctgacaggggataccttgctcgaatccttctcactattgagggccggcgcgtatgggaccgccccgagagctgctcgaggtccggacgacgcggtcggtcacgaccacaagttggcgcgagggtaccgccggagcaagtgcagcagcgagacgtacgagagaccctctcgcgctgcatcggaccaccgcgcgcgccggagagatggctgcaggcagcagcagcaagcgttcccctttcgcgcccgcccaacgtccctccttcttcttgctgccttctcccttttcttgcgaaggctgttccgtaagggtcatggccgacacctctcgtgacgggtcactcagttttggtccgtcctccttcgatcggcggtgtcgaggctcgaactctcgcccagctctcttgcgccgccgcctagcttcacgagagctgtcgcgacgatgagctgccaggcagcctggcttcgacggcccaaggtgctgatttgcccttctgccaccttccagatccctcagcgcagacctttacgacgccgcgaccgaccttctcgacgcccatgacgccgcccttgtcctcgccggcgccgtcgtcggccaagatgagcgcgtcgtccgcctcagcagcctcgacctcagcccctccagcgcctccgtccgagacgccctccggctcggacgagctcggaccgtcggcctcggtctcggtctcgagctcgctcctctcacgccggacgaccgatgccggcagctcggtcggggccgacgatgacgaccggtcgatcgccgcgacgagcgcgacgggcgacgacgacgcggcctctgccgtcgccgctgccgggagcagcgtcgcgccgtcatcctccaagggcgggcccggcagcagctcgtcgtcgtccgtcgcgacacgcgatgatgagagtatcgggccgtcggcgagcgttcgtcgggcgaacgtgccgggtcggccgcccgtcgacccgcagctggttgaggcgctcactggtaaggatcggctctacgtactcagtgtcgcccaggacatggagggcctctttggcaacccgaggtgcgtgttcgctcgttctggtccctggggccagcgctcttttggctgacgacgagcgagcccttttccccctcagccgggcaagcctgtcgtactcgccgagcacgtcgttccaccgccggatcgtctaccagtgcgcggccttccttggcctgcagacggctaccggcgaggccaaggctatcgtcgtccgcctgcccaccgagctctatgctctgacgaggtgcgtcctgctgcgtcttccgccggcttgaatatggcctgatactgacagcgtctgctcatccttgaagcgcgccgtatcgggtcatcaacattgcgccggcccctcagtcggcgtcgaaccagcctccgagcggcttccggctcatgcggcgcgatccggcgagcagcctgcccatctcgcgcggcgcgtcgcccggcggcgaggacggcggcgagcgagcgagccgcaaaaagtcgtacgagcagcgccaagcagagtacgatgccgcgcgcaacaagatcttcagcgcgaggtcgccctccgaggtgagttcggatgtgggtccgaacgccgccggcggaccgagcatgccggccgggcgggtcaacggaggcgcgccgacccgagggctctcaggcgaccgtcgggcggccggtcggtcgcgcgcttcttcgcacgcgagctcgaccgactcggttccggtcgtctttgtcgagcctccgccgtcggcagctgcagcctcagccagcggggccttcatctaccagtcggcggcgggcggttctcagtccgcctactctgcgcccctccgaccatcggcaccgacgtttgacccttcgatgcctgcgtcggcgacgaacatgctggccaacgcccggtcctacgtggctccgcccgtctacgcttcggtcggtggccatgccccggcgatggttaagtcgggcagcgcagggggcagctcgccgcaagcgatgggctcgtcttcgtcgtcgcgaggcagctaccgaagtcgtaacgcccgcccggcggcggctatcggccagcagcaagcctcgttcggctccgcttcctctgcagcatcgactcgcggagccggcggcagtcatcctggctacgccaatcagccacgcctgtacgagccgacgtcgcagcggtcgcagcgggcgccggccacgtacggccaagcgtccgactggcaggtcacccagcagacctcgcctagcgtgctgctccagcagcagcagcagcagcagccgacgatagtgcccgcccaggcctactatcagcctcagccgccgccgcatctagcgggccaggcctacatgtttatccccttcgaccaacccggtgctgcggccggccgcttcgtcgcgccctacggccagcaggcgttcatcgctcagccgccgccgcatcagccacagggccaggcgtacattcaaaccaatggccacggctcgccgtacagcgcccactcatacccggtgacgcccgcaggaccggtcttgccgtcgtcaccatcggctcactatctccccgctgccggaacggccggccaggtctcgtattacgccctccctgctgcaggctcgcagcaagcccagtacgcacagtatcggtccgacggtgcctcgtcagcgcctcccttctccaacggccaccaccctcacgtccacggccagccgtcgatctcttacgggcctggcggccagcctttccacgtctacggcgtcgtgccgccgccgccaccgcagatggcgatccctcagccgcagcactatgccgtcgcagatccggcgctccagccctgggcgacggcgagcagcagcggcggcggcaccggcaccggcaccggcggcgggccctcggtctatcatcggtcagactcgagtgtctcgtcctttggcgagggcagctcgcggccccagtcgcgcggctcctcgtcgagccgactcagttttggcgcgagtagcggtctgagcagcttgcgccagcagccgtggggctccgacgtcggcacgacctcaggcagccggcagagctgggcgtcaacgtcgaatgcaggcacctcgaacactggcacctcgaatgcgggcacctcgaatgttggcacgaccagtggccggtctggacgtcggcgcagctcgggcgctgggaccgatcgaccgccgtctccggtgagcctcgcctcagctctctataggccaggcctcgtactgacccgaggcctcgtactgacccgctcgctcgtcgactcaccgcaccagtcatcgacgacgtcgtcggtctcgcgaacgagagggctctcgcagctcgcccacattccgcctccaaaggaccacccactgccgccgcggccagactggtcggtcggccatcaacgtgcgtccctcaacgacttgacctttgcgacctctcgtctgaccgaggcccgtcttgaaccctttgcagaattcgacctgaaacgaccggatgggacgtcaacccacacccctcctcgcctggcgtcgacaaacgactttcctccgctggcgggcatgggcccgggcgtgtccgtccagccgcagctgacgagccccaaagcaggcggcgacggcatctggagcggcggtcgcggtcgagcggccgtcctgcgctccacagcgagcatgccgcaaggcgacgtcgagcagccgggctcggagctgttgagctcgccggatcggacgatctacggcctccatccggcaccgccgtttggctcgcccaagcgggccgcagactcgggcgccgtccgggaggacgagctcttcctctcggcgcaccctgccaggggcggcccagacgacgacgacgactttgagccgcgacggccgattgtccgctcgtcggctgcgctcttcgacccatcaccggcagcggtcctccgtccgagcgtcgttactcccggtgacgaggacggtctgctccgcgacgaggaacgggcgtcaatagaggataagctggcgagcctcaacctcggcctgagcgccagcgagggccaaggggcgagtgtcattggtcccggtctgacctactcgagtatcgtcaggagggtctgatcgactttccgggagatcgcgtgtctttctcctcatcaaacctcctgtcgacagcatcgctcccgattgagacgatgtatgaacgctctcctaggtgacaggttgccatgccctcgtcaggcgtgagcgctcttctcccgaccagtcgccccccggcaaggggtacatgcgattctaccgaatcttatacgatcagcacggacctttgccaagctgattggccaggaccaggcgagatgcggacaacagtctgacggcgatccagtcacagggacggccggaaagccttgtaaggggggtccgggaatcccgcgccggcgcgggccgagtgactcacaggatctcatcggatcgctgcgagactggtaccgctgggttcctacaacccaggacaggttgcttaaacttgtatgagggcgatccaatcagatggcggccggctagccaaccgggggggggggcaattcccggggcgcaggtcgctgggctgctgcgcgcgcgccgcctgctgctgttgcttcgccccgttgccccgccccccttctgcctgttgatgaccaccatagacctcgagagcagcaagggtggtcagagggtcagtcccgttcgtgctgtgatgggccgtcgtccaggtgagtagggggacgggatcgtcgccgccgattgggcaggtcgtgacgcgcatcgtccgcagcaggcccggcggatgatccggccgagctcgcctctctctcttgccctctctccctcgactcccatctcgctcttattcttcagacgactagccttccatccatgacgacctcgcccaagtctcccgatggcgccggccgcaaccggcccagcgccggcaagtggaggccgggcatgagtacgccctctgcccacctttcgcgcccgccatctcctgaccgactctcgcccctccctccttcgtcagagcccggcctgcccttcccaaaggaggcaacgccgcttgccgtgctcgtcggcgtcatcggctcgctcattgtcttccagtcctaccgtctcagtgagtggccggcgacgcgcgcatcctcctcctgtcccacctcgcgctctcctcccttcgtccccgcgtcagccgctgactcctgtacgcgaccttgaagttcgtagcaaccacgtcggtcatacttgcacgagcgcctcttgcaggccgatacacgctgactcgcacccgccctccgtcacccggcagtgggacctccagacgtggggcaaaaagggcgccgaggtctgggaccattacgagcagccggtcggacccgaggccgacgtggcccaggtccaaccggccaagcacaagtgaggcgaccgaggggagggtctggctgtctgtatcgaagggggtgcgatgaaagaaaagttgctgacgctggagccggctgaaagaaaggaggaggaggaggggacatgtgataggcggcaagtgttgctgcgacctgctccgttcagaccgagcgctcggcgtctgcgacgaggtcatgagaccggatcggagggtgcgctttctcctgggagagaatgcttgcgccgcctgggcagcagcctgcgctgcccagacgtcgcctggctcgagagcttcggatgactacttggccagtgtcaagacgggaaggcctgaatgccgggatcacgagggcctggctcgggcaccctgagcctggtagcgtttccgcttgtcgactgagcggcgggcgagatgtcagcgataggaccgaggcaaagatcaaagcaagactgtcgattgacggctggagagggcgtcgtacgcctggttgatgcggctcgaacgctcgacgttcccacccggcagatccggatgggcttccgcctggaggtgaatgcgggcgagcttgagcgcctcgtccgatggcaggtcgacgaaatcggtcggagagaagccgagcgtcgcatagtgcgcgagatggtcgtggaagtggcagaccggcttcggttgatgaggtgctggggtcggcccggctggcattgttcgcggtgcttccagctcgggctgagaggttgaagggggtcactcgtcggcacctcggtacctgttcgaaagtatgataacgtacctgtatcggtgtacgttcctccgcctttattgatgccttcacgacggtctcagaccttggcggcggctcgcggcctagcgacatgaagctgcgccagaaggcgtcctgacagggccgagcgcccagcgtgagttccagcacagattgcggcagccggcgtagagccaagactgacctcgtacttgcgcaaggccttctttttcacagttttctttggtcaaagacgtaacggtcagtagcagtctggacgacggcttgtcgtcgcgctgacgactcaccaggagccgtgactcctcgctcagctcagcaagcgccctcatctgcgagaagatcgcacaggacgtcagtaggctggaactcaaggtttccgggctcgcccagggacgtacatctcgttcctgctctggtgtgagagcaggctcagtcgtgctaggttgctgcagcggctgcgcgtaccatcgagtgcaagaggggtcgaagggtcagctcaacacgagcgtctgctttgagcgccacctgagaacatacctcggtccgcgccctcgatgccgtcgttccggccgctcgagatcgctcgcttgaggacgaggaaagaccagcgactggccgagagaactccgagttggcgcctgcgtcgagcggcgacggagttgtcgaccgcagctccgacgtcgtctcggcagtcgatcggcgagcctgagcagcagctggcttgaggctcggcagccggcggaccttgcgcggggcatcgggcggcgtagacactgcgggcttgacagcaagagctgcggccgagctcgccgagcgtcgacaagggagccggcagctgctgaaggtggcggcaggcggcggcgccagcaggcgcaggcagcgagggcggaacgtcgcccgggcatggaccatcggctggcggcggggaccgcgcaagtccttcagctagcagagctgtagcacgagaggctggcgtcgaaggttgctaatgaagcgcgaggcggaggtcgatggtcggagagagcaagaggcacgggcgaaagaaaggagagggcggccggcgacgaccgagccgtgcgacggtcaccttgctctctgccacttctcttggaaagctcgctatcgaagtcatgggcgttaagggcctgacctcgtacctcaaggaccatgccgccgccgtctcgtatgagcaaacatttgaggcagtcccgccgggcggcagccggacgccgctcgtcatcgacggctgggggtcagtgccagccctcgcctttcgacccttgcctcgcagcactttgctgacatcgaggacgacccgcagcctgatctactcgctcctcgtccagctaccgtcggcgtacggtggcgagcatctcgcctttggcaagctcgttaagcggacgattgaaggctggcgggccgtcggcttcgaggtcgtcgtcgtcctcgatggtaagtcttcggcacatgccctcgctctgctcgtccctgacgccttgcttcaaccatcgcaggacctgtcccgccgcagaagttccagaccgaggtcgaccgggcgacggcgctcctgcacgaggtctttctgtttcaccacacgtcgccgccgtcccgctcgcatccgtcggcgctgcgcaagatgcggctcctcccgcccctcctctactcggcgttcgtcgaggtcgccctcgcgctcgaggtcgactgcatctgggctgaggccgaggcagatgatgttgtcgcatttgtcgcctcggaccgcggcggctacgtcgtcggcatggacagcgacttcgttattttcggcggccgaccttgctcgagcggtgccgagcctgggcacgagcgaggctacattccgatcaacagcatgcgctgggagtcggtcgccgcgtcggtcgaagacgacgccgaggaggcttctcgcgcgggggggcagctcgacgacgacggcttccaggtcgtccagtcgaagcgcaagatccgaaccgacatctaccggccggcgtcgcccgtgccgccgtttgtgccgcacccggactttctcgtttcgatgacgtgcagcgtattcacgccaggcttgctcgccgcctcgctccagctgccggtccggctcctgccgctctttgcgagcctcgttggcaacgactattgcagctttggagcttgcctccagcatcgcggctcgagtgcggtcgagcgcgtcgagcgcgtcgctcgctgcctgcgcgagtcgggcgagccccggaagggcctcaaggcgcccgagggcctgacagaactcctcggccggacggtcgacgccttgctcgtccagggcctgagcgagagcgacaaggacgacatgatccacaccctgatcgactctgccctcctctacacgctcccttcgagtcttcctccggtcctcacgacgtccgagcactacatctcgccgaaccgggaggcggccgagtcactttacgctgccgccgtcgtcgagggtgagtttgcgccgaggctgagcggcgtcgtccgcgacggccgatacgtggccaggccctggttggaagatacgacgcgccgtagcgtcgcgcgtgtcgccggcgacggcattcgggccgcgtggacggctgtcttggcggacacgctcggcgtcggctacgtcgagcctgctgtcaggcaggtcatcgacgctgccgcggacgagcgcgacggcgaagagccgactgagccgatcgacctgctcgttccggaggaagagaacgactgggcgggcacccacagtgacggcgcgccgacggccatggacgacgtcgacggcgacctcgccgccgactctcaagtcaacctgcttgatgacccgatgctgccgtcggcaacgggcctcgacgagccgcacctgctcgtctatcaccgctcatcaacagctttgcatccggctctccacccgattccgacgctcgctttgttgctcgatgccgccggctgcagcgcagatctgtcgccgaccctcgaggagcttgccggccaggcgtctatcgtcgcgcagccgctcgaatggcggacgcaactccacctcgcactccttgcgtcgctcacgcctaccgtcgcatcggttcccgaccagcagaaaccgctcgtcctcagtctccgctggatgatccaggcgcttgcgcaagagggcgagaaggccgtcaaaggtcgaatcagccgcgccgaggtctctgccgtggtcctcggcggcctccgggcggctcgcgcgtggtcggcttggctttcgacggctatggagcccggagctggcggcgaggccgccccggcaccgccgttcgaccgatcggtcccgatccaggacattacaaaccgcggcgtgcacgtcacgtcgcacgtcttgcacacgctgcacgagacggacctcctccggcaagccctactaatcccatcgagtacgctgccccgggcgcacgccttctacgacggcaagcaactgcacgccctcctagtcgaggccgaggcggcgagtgccggctggctgccgaccttcgaatcggccgaggagcaggttgacttcaagcgatgcatcgccgcagtcttcgacggcggtctcgatgcgcttctgagcgctgagcctgagcccgagaccaagggcacaagaaatcagcgaaagaaggaggccaaaaaggcgcgcaaggcgcaggaggcttccgccggcgcccctccgacggccgggagcaagcgtggcttcgagctcctcggcgaagtcgacgcataattcgggtcactctgtgcagcggacgacgacagctcaacagcagctcactctgtgacctcggcctcgcccggccggcataggcttccgcgtcggccggcataggccttcgcgtcggccctcgcccttcgcgcagacatcggcaaccggctctctgcctagacgccgttcgtccctctcgacaccagcggcagccctggacgaaaaccagcacgatccaacggcgccggaccagaatcgaccctctggcgctctagaatggcgtcgtcgctcgccttgtctggctcgcactgctggccctctcgccgggcccggtcatagatgacggacactttctccggtcttgctctgagcttgacaatccgtccaacggcgctccttgacgagcccaggctcagctgactatgtacggtcagcatctatcggcacgagagaggtctcgattatgcaagcccagagaggcagagaagaagaaggagcacgagggggagccattgtcctccgagacgctcgaggacggcggccgaggtcttggccccggtgccactgacgccaccgagggcatggatttgctccgagaggccgtcggccgtataggtccggaccgagcggatccggaaccgggccgtctgaaaatgggcggggtccatgacctggctggcgcagtctccgccgcagcccgaattggcgtacgcgccgccggcccagtcgccgcagatgctcaggttgatgacgagcgagtgctcgcgaaagtagcggtacgggtcgcaggaggcggccgcccaggcgccggccgggttgccccaggtcgtcgggttgggccgcaggtcgccgatgtcggccgggatgtcgccgaccgtccactggagaaggatcgcgcagtcaggttgccgcctgtcgtagaatcgcagcagccagccggacgcacgctccaaatcttgacgccattgccgtcccagagcatcgcaaagacgccgccgccagcctcgttgaacgctcggccccaagccttggggttggcgcggtcctcaatctggcagcccgagccgccgctggacgggccgcagttggttgagagggcggcgccggtgaacgagcctgggttggtcaggtagcagccttcggccgcgtgaatgaccatctgagggagggcgcgagaagagacggtcagtcaaaccatcctagggtgccgatactcagcagggcgactgacctggttgatcgtctgcaggttgacgccctcctgcggaatgcaagctggtcagcgcatcgacgtttgcgggaagacgcgaggaacgcacgacgatgtcaatctgagagcgcgaggttagaagttgtcaatcggtgcaacgagtgaggaaggacgaggggccgcgctcacctcgccgttgttcggcctgcgtagttcccatcatttcttcggtcagcccttagcgactgctggccttgaattgcaggcttgagtcgcaccactcgggcccgtaggaccagatcgctgtcgaggtgggaagcgtcagggtcagacctcgacaggactcgcagttggcgggatcgtcgacccaccaggccagagcgcgcagccccacggcatctcggcgaggtcaaagatgaagagtcccccgctgaacctccgcttcgtctcaatccggacgctggcaggaggcgtcgtcagctagtgactgcaaaagggcccggccctagctcacctgtcgcggtaagtgccggagggtagcgacgtccagccgtcggcgcgcatcgtcggcaggccgtcgtgctgaccaatgtagacgaggcccttgcgccaggcgtcgtcgacgcccgtatagctaggtgggcgagagcagccaaagccggtcagcccttgtgcgcgtggcgctcagcccggagagaccggctgcgcacttgacgaagccgtgcgtctgcggcgacagaggagaattcagcctagcaggaagcgcgcaatcggtagtcgcacgcaccgggtcgggctcgctccaaaagtcccagtggtcaaagaaggtcgggccagaaatgtcgtcgacctgagaagaagcgcatgtggtcagtagacgactcttggcgagggctgataagacaggggccgaacgaggtagtagaccgacgtgtcttgccgagcctcgagagctgggcccagggacgcggcgtgcgagactgcgatgaggaggagcagaatgagagctgctggaagcggagcagggacgggcatggcggtgacaaggaggagatggtgatggttggcggacactagctgagggcgcgagaggagcagaggtggcttgctgaaggcgtcgccgagctccggccgggggctgaacatagaaaaaggggctgagacgctgatcggcggcgacggacggggctggccgcggccagtgcgttgtcctgtccgcaaagaggcccgatactgcagcgaggctggcctgcgaggtcgtaaggtgggcatgagatcgtcaatgggcaagggtgagtatagttggtgacggagaggaggagtgaaggctgaggcagttgtggcttcaggaggatcggctgagctgcgagaagcagcgccggatcggcccgtctgggaagaggagctcgacctggtcggggtcgagcgtctcgaggagtgggagcgggacgcgacgagcgagggacagctggtcgagcccagagcgttgagaacgtcagcggcttcgtatcgcgcagaccagacgcccaggacgcaccaagagaagccggacgcgcgtcgccttcgactcgctgacccaccgcccgctgtcatcgccgccgcgactcgtccgcgtcttcttccgcggagcctcgtcatagcccgcctgctcgtggatcaggtcgagcagttcgcgcccaactgtctgcagcgtcgccgccgcccagctctctggctcgacgcctgcgtcaggctcctctgcggcttcgcgctcgacgactgaacggcggcgcttgccagtgagtgtcggcgtggcgggctcaggttccgcgtaaaagtcggccgggctgctgatgacggacgagaggaagatcggcagctggccgagccggtcgaggtgggccttggcagcgcggtcgacgggcatgcgacggatcatcgcccaaatggccgcctcggaaggcagggatgcggcaagcccgtgcggcgtgatgttgagcagggccggggggccggctttggccgtcatctcgacgtcgtctgcggcgctcatgacgacgttcgagtcctcggcctcgtgcttgactagccgagagggcgaggacggctcggctttgatgagcggagctgtggttttgttgtcgttgtcgttgtcgtcgccttcgtcgcactcctcggcctcccatcgagcatcgagcgcagcaaggccgccggcttgctgaatgacggccgccgtcttccgggcgagtggcagcgcgccctcgagagcaaacatctggtcgtacacgttgcgctcgacccactcgcgcgccttggtcccgcgagcaggctgcgcgctcggcttgccctcgccgtacgcatcggtgagaaacgtctcgagcgagtcggcgtagatctcaccgacccagccgccatagacggccttccggagcgggtcgtcgtaggccgcaagacttcgggcggcatcgagccgagcttcaacgtcagtcgcgaccgagcccgacccggcagtgctgctgccgccagagtcgagcagcggatccgagaagaaagaagccggccggcgcggctccggcaccggggccgccaggaagtcacggcgctcattgtcgtacaggccggcgggcgagatggaagccggtgtgaaaaatggatagacgccatagtcgtgtggcgcggccgtccgggggcggaccctcggtgccggaggcggcgctggtggaggcgaggatggacgcatgccggcgtcagaccgcgcccaagtgaaggcctcgggcaagcggtcgccgaaaaagtgattgccgtaggtcgcctcaggaagggccgcaggcttggccggcggcgagtagaggagatcgggctcttgtccctttgcggtggccgtcgcgtatatccggccgagcgagccggcgagaaaatcgggcggaagcgactcaatcgtcggcggttccggtacggcgtcgagcagcgcgtcgaggacgtcgtcaagcgtctcgtcctcgcgcaagtctcggctcccgtcggcggcgacgatcggcccaaactcgtcgcgcgcacgccgggtggcaatcttgctgagctccttcttcgtctttgcccgcttgccgccggcctcccaccagcggacgatgttctgaaactcgagggcgtaaagccctgcgccggcgccgcggagccggccgttctcgtcgacccagccgccctgggcctgagcaataacgaactggttggacgcgagcggcgccgtctgagcggcaggcgcaaagtatttggcgacctggacttggacgcccttgcggtacggcccgcgcttcttgccgagctggccgttgcccgtcctctttggcttgatcggaggctggcctcctccccggctgcttccagcggcagcgccctcgtcgtcgccagagagcgccatcgagacagagcgcgagcgcgagggcgagccggcctgcgatgtcgcgcgcgagtcgtccatgtcggtcgtcgccggcgtcggcggctggacatggtcggcttcagtgcccgggatgacgagctctcggtaaaacatcaggtggttttcggtccagcggccgagcttggtggccatcaggccaaagattgactcgggctcattgaaagcgaggcagttggcaaagacgaggcgggcgtcgacctggaagcagctgaatgtcagacgacggcgcaagtgacttgagaccgctgcaaaaagccaggggactgacctcaaactcgtcgaacgacttgtagtcgccgctgtgagccttgcggtccatcgtcgtaaagtccatcggctgcgaaatgatggccgagtagccgggcgcatcggcgtccgaaaccggcttaaggaagaagccgtaggcgtcgcgccgcttaagctccttgagcatcttttcgagcacgtcgataaacggctgctgtagccggccgccgaccagcttcttgccgctcgcggcactcgctccgagcgcgggcactttgggtcctggcgggcccgcaggcggcagtggcagcgtcgggtcttgaatgatgttgtcatccggggctgggttgccgtcgtccaattgaggcgtgcctggcgtcgtcgacggaagaggggaagaggtgccgagcggcgacggtgggaaggcagccggcgatggctcagccttgacacgcgcgagtgcaggaagtgccggcggcggcatctcggccgatgcgagcggggtcgatcccctctcgtccttgacggtcggcggggcagaagcagacggcgccttcttcttcttcggcggctttatcacgaccggcgggggcttgacgacgaatgacggcttgggcaccggcttgtgctctttgcgcgcgaacgggggcaggccggccgggccatcactggccttggtcggcgcaggcgaggcctcggacaacgatgcgggcgtcggccgcgccttgagcacgatgcgcggcgtcgaggctggaggggcagcctcgacaaccgtcgctgaggtggccgtcttgggcggcttcgctggccggtcgccgttggaggagctgccagctgccacgccaccgagctcggccggctggccattgttggccttggcctcgctccggacgagcttgatcttgggccgctgaacagaaggtgctccctcaaggccagggatggatgatgccggcgttgctggccgaatagaggaggagcttgaggacgcgtcggccggcgcgccgttgctgcctcccccgccgccgccgccaccgagcttcagcttgatcttgagcgccatccctcacgcgcacggatcaggatggggcgaggtgtgacccttttgctctgcagggacgggccaagtggcaggatatttgtgcgtcgctggatgggaggggctgaggacctgaagcggacgaggagcatgtagagcagggcaggcgcgcatggcagaggtgagggtcagaggtgttcagcaagaggaagagtgcgagggcgaggaagtggaggtcgacgtcgcgaggcagactgttcgcacctcggttcgaaagggcgacggcaaaggcagagcaggccggcgagcttgcgaggacacgacgggggcggcgggtgcgacgagcgcaagtcggcagtggcctggggtcggttgaagaggggagaagcccagatggcccagactgggctgcctcccgctccttgcctcgcccttgccttgggcaagctccccaaggctcgagtggcgagaaagcgagaatctagcagtattaatcgcgatgtatgttgctgcgcgtgagctgctgaagaaagggaagacgggcagggtacgaggtcgtgcacgcgcatgcgagcgacgtcgattggtgacgcgggtgacgcgcgcgcgtgcacgagtcgcgcccgcgcacactgcgcaggttccatcgggcctcccgttcgcagcagtcgcagatcagccaacggccacctcctctttcgctatccctcctgcaccctacctgcacccgagcaacctctcccactcctctctctaatcagccaggatggatgacgcaggttcgtcgcttcatgctgcagtcagtcgatgcgatcacgggtcgcccctgcgccgccgatgtacctaacttggcgctctgctgtgggctgaccttcgctcgtcccgcctgtccgaactgtaggctaccgcgcacggcgccgtgctgctcaggtccgtcgctgattacattgtaagatggaaggacgtgccgctgatctccttcttcgcctctggccttgcagcaagccgaatactagtgcgtgctcggaacgcccgccgccgcttcgggtccgaaggctgatccgaactccttgatcgtccttctttcacagctcccaccccgaaaacggccagcacgatggcgtcgagacggtcgcgccgctgaacgggccctctgcggccatgatggagcacgaaggcgcgatgccgctcccgaccgaggccgagcgtgccaaggtccacatccccgaggtcgctgccggcgggtactctgtgccgtcctaccggccgcccgtttgggtctcgcccgaggacatcccgggcccgaccaactcgcaggccgaggcgcagagcaccgtcagccacggcgggccgcccgtccaggccgtcgagaactcgatcggcaaggagtcgaccgacggcgcagagatccctggcacgcacgagaaggccgacgcccagcggccgccgatggaacgccatcactcggtccgcgagaccatgtcgccgcatctccagttcatggctggcccgatgctcgtttaccacacggtcgccgacaacatctggcacggcgccggtgcgttcacgcctactcctactgacggtctgcaagctcgagcgctgatatgcgctttctcctgacagcgctcatcgtcacctctgacgctggctcggtttacgagcccggaccctcgctatcgtgttactgggacgctggcgcgagcggtcccccggccggctcaatcgaggccatcacggcttcgctcgagggcctctcgttccacagagatcctgccggcatgagcgcccggtctgagggcgagcgcatttacgtataccacggcccgcaggtgtgtctgtgctgcagctttcatcacgtctcctgccggctttggcttggcggaattctttgctgaaccaaccccggccggcgcgcatagggaacattcacgttcacccgcttccagatccggatccccctcggtccacagacgaccaaggtgacgtaccgcgtcaacggaggcacagctctcaacttccacgtcccaggcattggtgagaacctccgctgggcggcccactcgtgcaacggcttctcgggcggcgtcaagactgaggagttcttcaatgccgacaagggcttcacgagcggctacgacccgctctgggaggacatgctcgacaagcacgaggagaagccgttccactgcatggtcggcggtggcgaccagatctactgcgacagcctcatgtttgagcccgagatgcaggagtgggccaacgccgacacggccgagctcaagctcaaggccgccctcacgcccgaggtcatgttcgcggtcgaccggtccgtcttgcgactcgtgtgccactcggtcgcctgctgaccctcacttcgcttcgccgtctacagctactacttctcgcactactgcaagatcttccggtccggcgccttcggcctcgccaacgcgagcatcccaatgctcaacatgctcgacgaccacgaccttatcgacggctttggtgcgtgctcgctcgctagaggtcgttctgacccttgcctttcaggctgacgcacttgctttggcaggctcctacccggacgacctccagcaggcgcccgtcttcaaacacgttggctcgcgcggctacttctggtacctcctcttccagctcttcatcgttgacgaggtcgacggcacggacttcagcaagccgcaccccgtcaagtcgctcatcctcggcggcgacgggccgtggatccccaacccgggccactcgtacctgacgtacctcggcccagacgtctatatgctcctgctcgactgccgagcagagcgcaagaaagacctcgtctgcagcaagctcacctacgaccggatctttgccgccatcaaggcgctgccggctattaagcacctcgtcttccagctcggcattccgatcgcctaccgtgcgtctacggctctctctctctcgccggctccgtgtggtgaaagctgaccttttcttgtcctcctcctagcgcgcatgaacttcctcgagaagacgctcgacagcaaggccaacccgctaacggcgctcggcaagatgggcgtcatcccgggtttcgttaataagttcaacgacgaggccgaactggaaagtcgttttttcaacgtccctctttcgtgacgccagccactgatccagtcgcccttcttcagctggacgacctttcggaccactggacggcaacagaccacaagcacgagcgcaattggtccgtaacactcgatgctgaacactctctcgcctagactgaccgacctcctttgcacgacctcaggctcatcgagcagtgccagcggatcgcgctcgagaaccacgtccgcatctcgtttgtctcgggcgacgtccactgcgccgccgtcgccgccttttttaccgtccccaagaagagccaccgccttcgcgaggctgaggaccccaagtacatggtccagatcgtgacgagcgcaatcgtcaacacgccgccgccgccgctcgttggctcgatggtctcacgcctgggcgagaagcgccacaagacgatgcactgtgcgtcgcctacgagtgtctctccatcggctcgctcaagaagctaactggcctgacctttcctctccttcctttagacgtcaataccgacgaggaaatgatccaccacttctcggaggacaccgacggcaagcacctcaagcacgacacgatcatgggccggcgcagtacgtcctctgattactgcgctttctactgcttcttgctgaccctggtgcgctccgctggcctttgcagactggaccatgaccgactacctgcccgagacgggcgagctccgattcgacatccgcgtcgaggtcaagcagggcgagggcgagaccaagtcgtgcgtctacgagctatctgccgcctcttcgactcttttgctgacgctctgcggcctgccagctaccctatctcgacgcccgctcctgcctgggcgagggctaccgtatgagcagcctcgccctttgctctcgtccctggcatcaccgtctttccctctctcttttctgccctgtcccactgtatcatgcgctcgtgccacccgcgtgtctcgccactgtctcaatctctatgcgctgtctgtctctgctgctgtccgggccgttgtgggagtaccgagggcttctcattctgggcactgcgcacgagcgtcggcctccgccgaaacagactcgctccgatcgccgatgacctctttccttccaaccacaactctactcttcgcgaaccatcctcatcccgacattcctgcactgctgctgatcgacaatgtcgccccgcgtcatcgaaaacgtctggaattacccacggccgcccgcgctgcagccgacctcaaggtgtgctgcccgctgcagtcagccaggctcgccgtctcaatcctcgtcgctggctccgagctgacggcttgtgccggactctgcaggctgctcgaagtccggtgggtgagccctcagggcaaggagacgctgatggccaagacgaccaacggctgtcgggtgctcgagacgtcgtacgtccttggcttcgtcgacctggggcgcgacgccggcttggagctgagctgacagcctccggccatcggctcatcggctggagccagtcacccgcccagctactacttcccgccaaacagcatctcagccgacgtcaagctcgagaccgagacgaagcatacgttctgcgaagtgcgtgggccgccagctcgctcactacgacccccaagctcgagctgacagcctcgatctcgcccacagtggaaaggctcggcgtcgtaccacactctttcgctaccgtcactgtcgccccagccgacgcccgtccggtcgcgcatctggtcgtaccagtcgccaacggcaggcttcgctccgatcaagggctactactcattctacgcctcggccgggagccaggcaaaggacggcggctggcggtgtctcgtcgatggcgaggaggtcatcccgcagccaggagacttctacgggtcttggctcacttctgacattgatggcggcaagaagggcattaaaggaggtgcgtcggctctgctctcctgcgggagacgggctttgccggctcagaggctgaccctgctgagtggcctcgatcaactgtccctcatcgtgcaggcccgggtacctgggggtggtaggttcttcatcctctgtgtccatacagcgctctacttcccgatccccttcatcttcgcttgaacgaggcggtcctcctcgcgagagcctcgccccatgctctttctccggtcccgcgcttcggccctccttcttgatcacatgttgtaaagtctgctttttcgatctctgccgacatcgtctcgccgtttcttgagttttcgagcgactctgtgcgatttgagcgcgggtctgggccgacgacttccctccgagccggggaaccttggcctgctgcgcgctgcactgcggggagacggcgggagacgagctcggtcgaagcaaggtcgctctacggcctgctatcgaccaccattccgcttttcatcacttgccagctgcagctcagaaggatcgacacgcaagaccttccagagctcgcacccgatccccgcacgccaagtcggtcctagcgccggcatccaagctcggaccacctcagccatcccgttgagggacaaggggaagcccgaccttccctccctgtcggccgtcgctccggccggtcctcccctttgatcgcggcccgccagcctcttctctcgaaccacaaagctcgttaccagcatcgactccgatcgtgcacaacgagccgactcaaaggcttaaaggccgcccagcagctcagcagctcgcagcccgttcctgcctcggctcgcacgacgttcaagcatggccggcaacccttccctgccgccgctctccctgagccctttcaccgttccatcgataccttcctcgcctgcccgcccgagtcccttctccagaagcctgtcgtatcccgtgccgggctcgccagcggaagggccagcggagctgccgagaccgcggccgtcgctctcaactctggatccctccctcgtcgccgctggatcacgagctggcctacctcacaccctgtccgaggcctcgtctctcacgctgtcggcagatggttcagcttcgaccgtccggccgtcgccgtcgggcaacgacctcgcgaccgacctcgccaagtcccggcttccgctctcgtccgcagcttcgatcgactcgctgtcctcgaaaggccggcggttgcaacagagccggatccgaacgagcacggccgggcgctacctgccgcggagtggctcgcagcggccccagggcggtaacctctccgatgaggaggagtacgactcggatgatgccctgcgcaagcactcgcaagggctggaatcaagcgccctcggactcggaccttcagcagccgacctcgaggacgacgacgagcgtccggaagtcgtcgtcattatgtcaccccaacctccgagagacggcggcgcctcctcgtcgtcagaagacgaaggctcgtctggctcggacgacgacgaccagtcggacaccgacggccgcttcgacgaccacgagtggccgtcaggagcccccgcaccaccagcgtccggcttcaatcagatctcggcgtcccagcccttccactcgctcgacaagattgcctcactcgacagccaggcgatcgccgccgcgcaagcccaaatcctgggcgcggcaactgcgctgtttgctccgggccctgtggcgtcgggcgaaggcctcggctttggcgacgtcgaagaggaggacagcagccgcttcggacggagcgagagcgaccggtccagtctcgctcagctcgcgctcgccgacgcgaccgacgtcgctgtcgccacatctttcgtgccgcctgcgatttcgactgtgagtttgagcttcgaccgaggatgaccaatttcttcctccatactgaccctccccgcgctacttgcttcgcttcagtctcggaaagacatcccgatcaagattgcggtcgccggccggccaggggcgggcaagtcgacgctgatctcccgggcctttatgggctggccgctgtcggccccgagcacagtcgcgcctggaggtgcgtctccctttctcattcccttcagacaggcacagactgactttgatgtgacccggcgcttctccagtcgagatgcgggcagcccggccagagctcaagtcacgcgtgccccagctcgttcagctctacgaggtcgactcgtctcgactgacggtgggcgacgacggtcggccaaggatgccggccgagtgcggcgagctcgaagcattgatcgtctgctttgacgcgggcgatgggtcgtcgctagaaggcgtcatcgacctctgccgcacgtctctacatcctcggagggagggtcccgaactgcacgctgattcgacgcctttccaccgcctacaggcctgcgcgagagcggcatcccgttcctggtctttgcttgcaaggcaggtggcgtacctcggccaaaggaggtagacattgctagcttggccgcccgaatcggtcgcctgatcgagatctcgctcgagcgcgacgccacccgagagcagaagggcaagggcaagtaccaccaggccttctcgttcctactgcgagaggcttacaaccggaggtgtgtttcttcttctgggagttaccggttagtcccagaggaccccgctgacacaaattgggcggccttaggcacggcacctacagcccgttgcccccgactcccggccctgtcaaagccggcgaccagacgatcgaccacccggcaatgcagcagacgcccagcctgtcggtccagacaagcgccgaccgtgggatgagcctacaggtggccggtcctggaccacgcgactcgggctcgtcgctcttctcgaccgcctcgcagcagcggcttgcgaacgaggttctatacgaccaggccccttcgtcgagcacgtcgtccctccgcctatcgagggatagccctgtcgtcgtcacgcccggcgacagcatcaaaagctcgtggatcgtcgacgacgactggcaaggcagtcagcacagctttccagccaagatggagctcaaggaacgcgaccgaaacgggtgcgtgtcgtcggttgacatcccatcaaacgaggttgccgccgctgactgccttctctttccaggaacctgatgttcttcaccctgcccgagctactcgctcagctctggctcaacgcctttaccggagagcgtgcgtcctcgacctgccagcgggtcaatctgaacggctgctgaccctgttgttgtcgcagtccgcaactttcaccgctttttcttctggtcctaccgccgctttgcccgtccgcgcgacgtcctgagatttatcctggccgagatgatcaagctcgacggcaaggagctcgccggaacctacgcgcagctaaagtgcgtcttccgtttgtaaggcgactgatgacctgactgccgctgaccctgcctttgcgtttttcctcgctcgtccagatggtgctcaatcatcgcctggtggatcgagaaacacccgcgcgattttgccgcgccgggcacaaaggcggcgttcgacgacatctttgacgcgatcgaggaccggccgcacctctgtcactttggcgacaagtttctctcgttcgcctaccacctcgacgaactcgtgccagaggagctgccctgggcggtgtcagacgtcgacgacgacgagattccgactgggtcaggtctctcagtttctgcgacggaaagggcgccggccggtgtcctcgtgtcgacaacaacgaccgtctcctatgagccccgcccgatctctgtcgacgatctccaaggcagcaacaagtcagcccaacgctcgacctctagcattgcctccggatcgcgggcgtcatcggtggtcccgcgagagcgacacgactcggacgcatcgcgccggtcagccggctcgctgggcaactcgtcggccgcaccctcttcgatcgacaacccgctcaggcaggccgtctcgaacggctctggctcggctcagacttcggcaacgtctgctccgagtctcgggcccggcggcctggccgacccatgggagtcgaggcaactcaaccggctcgtcagtcgtttcaacgacctctcggacctccagattacgagcgacatcactcggctcatttggcgctactttgagcgcatcgaggtaagcacatcctggttgcgctagttgctatcgctctcgagtgctgatccgaatcctcgcttatcccctttgcagcctcgagacgtactcacccatgtcctcagcggcagctgcgatggccaggactcgcccgtcggcctggcgatgcgccatttctacgacgtctcggccgtctttgacgatctctcaaacctgtaggttccaggagcgggtagcatctggcgtgccgcctgctgaccattcccgcctcttcgaccagctttgtcctgctcgtttactcgcaggccaagaccaaggcgcgcgcacgcatgtacgagcgcgtcgtccggatcatcgtcctgctccgaacccagaacaactatatcgcgctcctctcgggcatgacggcgctctcggacgtctggatgggccgtctccgggtgaccaaggcgctcgctcaggaggcgctcgaacgcgcaggcgacaccgctgtactcaagaagttccagagccacggtcgactcgtcgacaaccggcagaactacaagacgtatcggctggccgtccgcgaggacgaggcggcgaagcgaccggcgatcccgctcgtccccgtcatcctcgccgacgtcaaccgcgcggcccagatcgagggcgtccgcaagaccgacggcgccatcgtctggtcaaaatacgacaagctcggctcgatcctcctggccatgaccgaataccaatctcgcggctgcccggtcggcccggtcgtgggcccgaacgctgtcgaggtaatgctgcgcgacaagcccgacatcgaggagcgggtgcgtatcgtgcctttggacgaggctggcttcgccgtcgtcacggagctgaccatgctgttttctcttcgtcatcggccccgcagatcctttaccgccgatgtgacgtcctcgccgccgaggagcaaaacaccaacgccatcacgtccgccttccgcaagtacttccgcaatcacgactgagcgcactgcagccttctccccctttctgttgtacaacttggccggacgacccctgacgacgagcttggaggctgcccgtagactagggctcccctctcgcatgacccctttgcatcgaatgatcgcagcagcgccggcagagaagctagacgcgagccaagcgtgacagcgtcggccgcatgagcctgtctaaccctcgaaatagcggctcgttggctcagcgaaaaacaagtgtatcagaacgtccggctgcggacgaggccgacgagcgcgttgccgagcgccgtcgtgatttgacccgcctcgccgagcgagccctggagctcggcgtagccttcgagccgtcgggcgagaaatgccctcgtcgatggcatcgacggctcgtcgagtggcagcgacagctggtggagctcggtcgcgaggtagacgagcgagagcgggatcgtctcgtggaggtcctgggggccgcaagcagacgagcgtcgggcgttagcgatgcgtcctgaagcagcggtgcaacctcttgatcaacccgggactaactgctcgcctcggctgcgcgagctgcaaggcgtcgtctgcgatatgaagggctgcggggcatgacggggtgccgtcagtcgcacgcatcgggcaaggccgacagagagggagcgatcacgcgcacagtgattgaggatcgggaaggggttcttgacgccgacgccgatgaccggcaacggcgtcgccatgaccgagaagagggcgaaggcctgatacgacgggcgacgagcagggattgcacgaaaggaggggcgcgtgtcaagcgggcatcagcaacagcggacaggccggccaggagaaagctgaacgaggttgcaactgacgtctgcgaggtacggccggacctcctcgttcatctcgagccgccgctcaagcacctcgcgcagctcaaccttctgcttgctcgcctcccgatcgagcttcagcgccttgaactcggctttgagcgtctcgcgccgctcagcgagccactcgtaaacaagcgcccgctccggctcccggccgcggccaaagagcgtctcgattccgatctgcgggagcgcggccgagtactggtagggcggcggaagcaagagcgacgctcgagagagcgcggcagaggtgaagccgtgcgcggggatgtgcgggagcgcgtgccggagcaggagcggccggatcgtggcgtgggcgtggccggccattcgtcgagcagagggacgtagagaggagcggggctggtggaggcgagacgggttcttgcgaggctggccaagagggtgcaggaggtaggtcgacgtcgggcggtcgggtagacggcggcgtcgcgtcgcagctcaccggctcccgatcgtggatatcaagggcctcacgtgccgaccgaaactcgccctcctcatgcagagaagcggacacagtggcagcgcagatgacgacgggcaaccctttgaagagctacgtcgctcttctctcgcaggataaccttcctctccctctcgcactacgctgacgacgggccattaaacggttgccacgggtcagcctgagtggcctgagcagcctgggcagaacaaaagcgcccatttttctgacaacggtaccctcgcgcgcttgagtctccctccgctatcagtcatgcacatatccgtttccgcctgtagtcatgcgcatatccatcgagtcaaggcagctacaggtcgtctccgtttttgagtgacagcccggaagacggctctacgcagacgcgcgcgcaattactcgcggggtccaccccggccgaggccggcagggcggggcgcgtcggcgtcacgcgagcggtactcgccacggccctcggggcgcggggcgcggtaggctccaggggcgccagtcgggcggccggcggcggccgggcgggcggggcgcttgtgcgtgttggggacgatctccgaagggaggtggaggaactcgcggaggtagtcaagaccctcgggggtgagcgagtagtagtagtactgccacgagactgagggagagggaggagcggaagcgtcagtttccgggtcacagcgccagcgcaaaggcgagacacgtacactgcgtcttgacgtagcccttcgaggtgagcgactgcatggccttgatgacctcaaggttcttaacgtcggcgatctcggggtgagtcggggcgttgaagtccttggcggcaacgagaacaccctctgttgacaggcgaacgaagcaagcagaacgaggtcagcagacgggtcggccaggcatcggccaggcaggcagagtcaaaggccgacgcacccttgaagaggtgctcgaagatggccttccggttctgcttagaaatgagcatatttaaacgacttgaggaaaattcggtagcacaacgaaggttgtactaaggcccggctctggttggtagagaaaagacggacggcggggtcagctcgactgaggtcggcgcaagaacaaggcacgcgacgcgctccggtcccttcatcctcccggctcaaccgagacccgccgtagcgcgagactcgagctggtagacggctcgacctgcagcagctgctaggcagagcgagagggccgagcgacgagctccagcaccacgccctgggcgttcctgaccagctggcaaggtcagggtcgcctgagctggagcctgcccctggccccgagaggccgtgacctcccgggcgcggcggaaaagtacaaagccgttcgtcgtctcctccatcaggccggcccattgcgcgtcccgtcccgagcgtggatcgtaggactgactgagaaggaaggatgcgttgctggaggaaagacggtcgggccgccggtcgcgatgaagtgaaaagtcccgtgcgggcccagggaagcctccagaaacgagtcggacccgccgcaggtgcatcgcctcctcctcctcctcttcgaagcctcgcagcaaggccctcttcatctgctgaggcgctgcagaggtagctcggtctccaagtgtcggcgttttgtgacggaaggtcgtttggttgagaatacagtgacgatcctgcagctctccctttgaaaggggatcagcccgcctagccttccgcagaactccttgcccgaccgcatcactgcaagactgccctccccctctctgcgtgtactttgtagtcaaagcccctgaggcgaagcagaatgccgtcgacgatcaatttattgcgctctttggtgcgactggctgttcgcacggtcgttcgagactcgctgggtcagtttggtccggccctgaagaaatgtgtcaggcgcaggatgtctaacctcgccaccaaaattgtttttctttgttcttcgttgcctaggtgcaggattggcggtcgcagtgttcttgaccaatcgccatgttcgctcatccatcctcatccaccaatctgtaacccccctccctcaaccccccccccttctccagccactctctccaaccctaacgtcggcgaggaggctaagcagcacgctcaggacgtccttgacggtgcgcctccccgctaccgattctcgattctgctactgcgactgaccagtctcgcaaccctgtttgctcttctccaggcaaggctgagcccaactccaagtcttcgtccggcggcgcctctgagtcgtctgactcgtccgacggcacgccttcgaaccgcgttcttggcggccacaaggctgccatccacaacgactcggttcccgacgagaccaaggagcactcgcgccaggtccttaaggatgctggagtcgaggtcgacgagtaaacagttccctctgtctctcggctgcccttcgcttgccctctgttggcctctctagtcacatccattgtagctctagcatccctctattcgaatgatgtaccgctcccatcaacttgcgaggctcagccgtcctcggttttctgcatcgggtgcgcctctacagagcgcagggccttgacctcgatcacctgcgcaatgttggcgatgttgggctgctcgacagtcgttcatcttcccttttccgaatgcggcttcgtttcagaagctatgtccaggccaaggagagcagcaagccccccttggggaaagtccacccataactcggtctttgtcgtcgcgcagcaaggctggcaacggccgaagccgaccaggcggagttcgaaactttctggaaccgacgtcggtcgacaggccgtcgccgctgcctgcctctttaccaacccatcctccaaccctgcctggcaatgtgaggactcgttgagagaggagtgtagtcgcggtcgtgaccagcaagctgatccggcttttccccgacgcagatgccttctcccgctgccgacatcaccctccaggatcctccgaaggaggtcaaggtctcgccgcaggacgtcgcgatcctcaaagaggccatgggcatccaccgttcgtccctctgcctgctatccgccaggcagctgtccgggctgacgcgccgctccatgtcctgcagccgacttcccgaagaagggcatcaccttcatcgacttcctcccgctcctgcgcaacccgcagcacttcgagatgctcctcacccactttctcacgcatctctacaccgtcaccttcccaaagcaccagatcaccaaggttgactacgtcgtcggccttgacgcccggggcttccttctcggcccctcgctcgcgatgcggctcggcgccggcttcatccccgtccgcaaggccggcaaactccccggtgcctgccacaaggtcacctacgtgcgtggccggcttcatccctcgtctagccgagactcctgtgctgacagttaccttcacccgctctcgcctcgtttagacgcttgagtacggagaggactcgttcgagcttcagaaggacgccatcccggagggctcgaccgtccttgtcatcgacgacctgatcgcgactggcggctcggcctcggccgcgggcaagctcgtcgccatgtccggcgccaagacgctcgagtacctctttgtcgtcggcctgccgttcctcaacgtacgtcctgttgcggcgcgctcctgtcccggacagggtgacttgtcgtccttctcgttcttggctgcaaccatactgacctctgacgccccgaccgtcttgacgcaacagggcgacaagaagctcgacgcctcctcgtactggatcgtcgagggcgaggactaaagccctccctgccgctccggctcgtcacctccttgactcagcagagtcgtattctctcgacggcacgccactcgcggcctgtccatcgaccgccttcccccccccttccccgcatcctttagacacgattagagacgattcaatggtcctgcaccggccttgccgctccgccgactctcgggcgcgcatctccagcgcactcagacctgccatccggcccttctgctccgtctcactgttcatgctcagcactcgacagtcctgcttttgcctcgagacggacgacgagtgcaacggcccgtacttgagaaagatgaattccagcgcccggccagcggaatcatctttcgacctccacgcctgcgcgcacgcgcgttgcgccagccacgacgacctcccataccacccttcatctccccctcccctcggcctccttccaccatgtctaccggctttgagtgcgtgctggatgctacccgatcgctgcgctcagacctcgacgactgacgagctcgcccgcagcttctcgcactcgttgcgcaattctcacctgctctcgacgacggccgctgcgggcaagtcctcgacccggctgccgaaagcgaccagcacgggcacgaccatcgtcgggtgagtcgaggtcctctctcgggtcctaagatgccgtcttgaagctgaccggagtctcggcgctcgcagctgcatcttcggcgacgtcgaggccggcacgggcggcatcgtcctcggcgccgacacgcgagcgaccgagggacccatcgtcgccgacaaggtgcgctgccgagctcggtccgattgcctcacgacggcctgctgacctctttggcttgcttgcctgttgcctacagaactgcgagaaggtcggtctgtgcctccggcgacccgggcgatgttcgggcccccgtgcgagctcgtcggcgagctgcggctgacccgacgtgccacccacccccctcctctagatccactacatctcgccctcgatccgctgctgtggtgccggaacggctgccgacaccgagtttacgacggccctcatctcatcaaatgtcgagctccatgcgctgtcgaccggccggaagccacgagtggcgacggccatgacgatgctcaagcagatgctctaccggtgcgcgccccggccggcctcccccggtcacagcccgacagccacaggctgaccttacgcctcctctctcggccgtgtgcctcgcaggtaccagggtcagatcggtgccgcgctcgtcctcggcggctacgatgcgacgggtccgcagctgttcacggtcgcgccgcacggctcgaccgacaagctgccatacgtgacgatgggctcgggctcgctcgcggccatggccgtcttcgagtcgcaatggcgctcgggcctgtccaaggccgaggcgatacagatggtcgcagcggccatatcggccggcatcttcaacgacctcggctcgggcagcaacgtcgacgtctgcatcattgagaaggacaagacggaaatgctgcgcaactttgagatgccggtgcgtcccccggccgcgaatgctcagtctttcgaccttatgtgggagaggctgacccggccgtgcgctccgctgcagaacgagcggccaacaaaggatctgtcgtacaagttcccgcacgggacgaccgcctggcgcaagatggacgtccgcaagttcgtcgtcaaggaggaccgcaagacgtttggcgccgccggcgtcgagggaggcggtgtcccgccggcaggcgaggccgcacccacggccgaggccgcgatggaggtcgacgtcggggcgtgatcctcgcgcacgattcatgacgaccgcatacgacatcgcagcgcccttttgcaaggctctccttctggctcgctcgtgccgcatgcgcgacgactcttcgggtgtcattggcatccgcgctcaggcgccctgcctctgagcctgctgctgcttctgcatcatgagctggacgaccgcctggcagttctcctgcttcttctcgatcgtcgcctgcaacagctcgagattcctcttgacaaacgaccctttcgacttgtagtgctccagcgcctccttgcgcgtctgtcgcgagggagggcggttagctgagccggacctgaagacgagaccaaaggaaactcgcctttgacacaaagtaccccgtgccgacgtcaatgatgacgttgtcgacgtccgtcagcttgccggggacgtagagcgagctcgtcagggggatgaggattgctcgcgctgagggcgaaggtcgacggcttcggtcagcgacgcgtctcgctctggctagtgcgaagggtaggtacgcacgcgccgtctccgcgttcatctctccgacgtcgttcatgcagccgaggaacttggcctgcgcctgcttgagctggccgaacgagttggtgaggtgatcgagctcctgagggagaagtgcagacgcggcgggtgccggcgggtcttcagcgacttgcgagagaaggagctggttcggcagcagagacggacctcatcgagctgcttcttgacctctgacagctgcttgaaatcgaggtcctggaccgagatctgctgagacgccatggccagaaggctggaaggagagttgggaactggaaggcgcaggcgaggcgagggttgtggctcgacgagagttggcggacgacctgcgacggggatcctgcttactgacggcttctctgtcttcctgctaggcttgtcggcgagcgagcgacgtgtcggcgagtcgaagaaggggcttggaaggcggtgatggtcaagggaacaagagcagcctcgtttcgccctcgccggctcccctccgacgtccaacctctccctttcctcgcattccgcaaccagcagtgccttgccagatgtcggtcctcgctccctacaaggagattgcctccaagctctcgagccagtacgagaaggccaaagcgagcggcgacctcttcgcgtacgagtcgacgatcgagcacgtcgaggaggatggcgtccgagtgagttgcttcgctcccctcccctctgtcgacgaagcgctcaactgcgatcctccctttgaccggccagttcgaggtccgcgtctgtcctgagctcaaggcaaagcacgactcgtcggccgccatggccgtcgactcggccgagggcgacgacgatgacaagccaacgccggcaccaaagcgagccaagccggatgacccgttcgagggcccgtacgaatcggacctgctcgtcggtcgggtcggccaggaggagggcggcgagaagatggttgcgctgctcaacaagttctcggtcgtccctggtgcgtcggcggcggctgaagatcatcgcagaaagtcccggcagctgacaggtcggcactgcgctcaggccactttctgctcgtcaccgagggtccgtccagtctcctccagacgcctatatacggccaagactgacgccgctcgtactcatcgcgcgtcatgatcacagcgttccagtcgcagcactcgccgctgcatccgccgcacctgctccacgcctacctaatgctgctcgccctccggtcgaccggcaagcagtggatcgccttctacaactgcggtgagctctcgggcgcgagccagaagcggcgccagtgagttgggcgagacagcaatcgtcggaggtggtcgccggtgctgaacagactgatccctcgcccgtgctttcgcagcatccagtttgtccctgtcgagggcgaggcaccgatagaggaatggacgtcgagcgccgaggtcgagaaggagggtgtgtacctcgcttgcgtactactttgcgccttccgagtgctgatcgcgacgtgcccgcacgccagacgagccctttgcgctgcactacctgccttactcccacgcgtccttccgtctcacgtcgtcgctgcgctcgccagcccctcagccagagcgggtcgtgcccgcgctcatgcgggcctacttttcgctcctcgacgcgacccatcacgccgtctggaactcgccctcgacgcagaccgacgaggcaaagcacgctgcgccaggccccatcagccataacttcgtcctcacgctcacccacatgacgctcgtccctcggctgcgcgagacgtcggccctgctcgacccgccgatgagtatcaactcgctaggctttgccggcatgcttctctgcatgtcaaccgacgagctcgctaggcttcgggctgtcgacggcggcatccgaagcgtcctccgcagtgtcggcgttgagccgcccacggccaagacggtcgaggagggtgagcttgcaacgtcttagatggttggcttgctgggatccagaaagagagggttgagcatcgttggacgcccccttcgctttccttgctcttgcagaagcgcctctgcagaggagtgcgctatgacgttcaagcggcggatctagatcgacccgaccttgttgagtagccggccctccatgcctcctgccacgtagattgactgtcgatgcgaggccagaaggggtcggtcagcgacggcagagaaggattggatcaactgtgaactggccgcacctggcccgtgacatggccgctgagccgccagctggcgaggctcaagacgtggttggcgacgtcctcgggctcggcgagcttcttgagcggcgtcgtggcgagtgctgcgtagacgacgtcggggtcggccagcttctttgcgacggcaggcgttcgcgtccagccggggttgacgacgttaactctggccctcggcgcaatcaaaacaatctcgttcttgaggctcttctggaggccgtcgagaccagcctttgacgaggcgtagtcggcgtggaaggcttcgccaaagaggccggccgtcgagccgataaagacgacggcgatccggtgccggtcctcctctgcgacgtactgcagctggttgaggaagcacttggcgaggataaaggagcctgataagttggcataaatgtcagcatcgggtcatgagcagatgcgaatcgaaaagcaaggccaggccgcaccggtcaggttgatcgacagcgtcttggtccactcggaaaggggcatgtccctgatcgcatagtcggtcaagccgatgtaagcatggttcactggttcagagcaagacaaagtcagcagtctggctaatccttttcaggtccccggctggaaagggagccaaggggagaaggaattagactgctgcgcttgaactcaccgacgagcacctcaactcccttgccgagctttgcccgcgccgcggtaaacatccgctcgacctcctcctcgctctcgacgtttgcctgagcccggcaaacacgctcgttgtccgggccaaaggcgtcgacgagcggctgctcctgcgtgttgaagtgggccgtgacgagcgcgtcctgatcgacgaaagccttcgccgtagccaggccgatgcctcccgaggcaccggtgatgagcgtgtgtgcgccagagaggccgaggtcgaacatcgtgggagtatagggcttgattttcgagatcgtccgacgagtgcgatggagtcgaaggcaggtcgtcggtgcccgacctcagcccgagcgcgggtcggtcggaggcagaacgcccagccgaacccaacagcaccgggcctgccctgacctcgccctctcgacccgaaccgccatacaactctgaagcaaccgacgacacctcttgattggcatggcgaaacgaggagcttcttcccaggtccgtcgcgggtttcaggcggtcaccgggcgagctgcttcaagctgtcgacgcgagagctcacccgacgacctcgctccctccctccttccttaccactcgctattgctcgctcagattacgcgcgaaggcggcgacgaggccggctcggacgacgaggaggtcgggaaaaccgttcgtattgcatcatgcaagctggacgcccgtctcgctgcgaccgagagctgaccgtcgcacgatcgtggccaacccttgtccgtgatgcaggaggcgccggcaccgcctgttgagcggagacagtcagtcttgggccgccctcgcgcttcttgaaggcgaaggctgctgactgagatattccgctcgtgtccttgcaggattcgaggcctgccacagcgcaagacggccaacccagggctggcgtcgccagcttcaacgagctcgtcggtgcgtcttcgcgtcgccactgtcggtccagcttgtccctgacctcgtcaacctgcttctacagacccctccgccggcgatcgcaaactttggcttggcttcctttggcgcgcctcctgcgaacccctttggcggaatcgccagcagcggcttcacgttcggctcgaagccctccagcagcccggctgcgtcctcgtccgctggtcagactgccagcaagcctccagccaacccctttgaatcggtgcccccaaaccccttcagctcgatgccggtcccgggtgcgcccaaaccggctgctgcgacgccgttctccttcggtgcaacccctgtcgcgccgccagcaacgtcaagcccgagcggagccagcaagcccgcgtcatcctcagcgttcacgtttggctcagccgcagcggctcctgcgcccaagcccacgccggctgggccttcgtcgctcttctcgttcggcagcagcagcagcacaccgagctcctcgcctgcggctcctgtatcgtcgtcggcaccggccgcatcctcttcgcccttcacctccggctctgccccgaagccgcccccgctgtcgaccaacgtttcctcgagggccgtgcctcccacggcctcatcgacggcactgccttggggctcaaccccggtcttgccgggcgacaaggagctaggcgctgcaccgacgtcgctcgacgccgataagggcgggcccatcgtcggcgaggacaagtcgaaggctgacgatggcgcgagcacgcgctcgcagggcgcaccctcgacgacgggtgttttcacctctggcgcttcgagacctgctgctgctgcccctgctccggctcttcctcccgcggcgccggcaacgctgccatggggctcgacgcccatccttcctggcgacaaggccggcgaggcgcccaagagcttcgagcagtccaagggcgggccggtcgtcggcgaggacaagatctcgaacggcgacgtcgacatgatggcggcagacgccgtctccgtcgttgctcagccggccacgacgcctgcggttgagaaggaggcgccgctgtttgacagccggcctgcgctcaacggtaccaagaaggcttcgttcggcgcgacggcggcggcgtccttgagcatgcggcctccgcccttcccccagcctgcctcgacgtcaatcgccgccaacggtgctgcggccgacgcgtcgtcatcgacatcctcagccgagcactacatgagcctccgcggtctcaacgtctcgctcctgtcgctgctcgactcgctcgtcgccaaggacccgttcctcgacctctcgcgcaccctctcggacctcgccaccggctacggatcgaagcgggccgagctcgtcaggaaggcggcgccgcagctcacgcagcgcacctcgccaccgaaggcgccagcccagccgctcccagcagcagtcgtcccggcggtgcccaaagcgcccgtcttcgcgagcaccggcggcttctcgttcggcggtaagaagattgaggcgccggcgggtgacaagtcttcggcagcgtcgcctttcggtagcttcccttcgagcggcggcagcggtggaggcttcacattcggaggagccaagccgaccgcggccagcggggagcagtcgaagaaggacgaggcgtcgtcgacgccggccaggcctgtggccggcttctcgttcaacgccagcacgactccggccaagtcccctgcggcctcgacccccggattctcgttctcacccgcgccggccgcgaacacgacggctgcgcctgccaagtctgcctcgggatcgagcgcgggtgccttcctctcgtcggtgctggcgaccccacccgcccctgctgcagcagagaagccggctgccgccgaggcgcccaaagtgggcggcctgtttggcttctcgccgtcggtctcgacttcgtcgtcgtcgaccgcatccgcgcccttctcgtttggctcctcaacctcaacaatggcgtttccggcggcgccggtccagccgccgagcttcaaccgcctgccgtcgggcactgcaaacttttcgtttggcggcggcgtgaagcgctcagtctcgtcgtcgtcgttcgactttggcagcggagcttcgtcgtcaactgccccgccggtcgctccggcggcgaccgttccagctacgaccaccgcacccgctgccgaacaggaggaggacgtgccggcgccgacgatcccgtccgacccgactctgatggagaagggcgagggcgaggaggatgaggagacgcactttgagctcaaggcccacatccacaagatgggcgaggacagcaagtggtccaaggtcgggaccggcatcatcaaggttaagagcggcggaggaagcggcgctaagggccgcgtgctcgcccgggtcgagggaaccggcaagctccttattgtgagcctcacttccgtctgtttgcacggggctctcggtcgactgacgccgtgtctcctctccgttcttgcctcggcagaactttgccatccacagcgcgctcaagccgaccgtcgaaaacaagtcggtcaagctctctggcttcgaggggacgacgggtcggcttttcctgatccagtcaaaggacgtggccctcgccaaggcattcaaggccgcgctcgacgagcgtgttgcgacgatccctgcctgagccggtcggacctgcaatccagatgggcttgcctgatgacggcagaagaacaagatgcgcatatatcggtctatgggagcggacggtgagggggatagattaaggggcgccacgtagggcggctgggggctcgaactacagtccttgatttgaggttgccggcctctgggccgacaccttctagtctagtgtttgaaggggatgaggacattaggcagcagggtaggagagaggtgggggcgctcaggccatggtgccctcggtcgtgcgcgcgacgacgcgcgccgatttttcagaccggattcggtcagaacgcttgatgcaagcgctaaacgagtcgctctcgaacacgtggaagacctcctcgagactgaggccagacctgcagggtgggtgcattggaggaagcggtcagttaggtagcgaagcgggcgaagagaggagagcggacgcacgtctcagggtagaagaagacgcagaaaagccagccaaccaggcagaggccggcgtagaagccaaaggcgccggcgggcgtgatggcgtccatcaggctgaggaaggtcgcgccaatgacgaggttcatgctccagttggtggcggtgcagagactggtgccaatgccgcgaacctcgagccggaagagctcgccctggagccaagggatgttgccgaggccgatcgcataagaagcgacgtaagtgaccatccagacgaggacgagcgccgaccaggccgtcgggtagtcggagccctcgatgagcttaccggccgtcgacttggtcaggactgcgcaggccgggcagagagaaaaatgccgaggtcagccaagcgaaagcgacagaggcgtcgacaaggggcttgcgacgcacagtagaaggacatgctggcaagcacgagcgaaacgatcatgcccggcgccgagaagaccatgatgcgccgccggccgatcgggtcaacaatcttaagcgcgatgacggtgcaaaggaagttgacggcggtgatgatgagaccgacggcggtcgcattgtcaaagccgacggccttgaagagcgtcgcgctgtagtacatcagggtgttgaagccgcagagctgctggaaggcctggaggccgcaaccaatgactgcgcaggagggccaggatgtcagccacaaggttcgcgagatcgacggcaggcaggggatcacacgcactgagggcacgccggttggtcgcgacagtaaagatgctcagcagccgcgaaaggaacgggacgtctcggccggcctcgcggccctgctcgacgctcgcactcaggagctggagcttgccctcgagctgctccgtgcttgcgctggcgtacatcttgctgaggacgatccgggcggcgtccatgttgccgtgccggaggaggatccgcgggctctcgggcagccagtagagcgcgccgagcgagaggatcgcgggcgcggcgccgaggccgaccatgtaccgccagccctgagcgacatgcgcaaaggcggcgccaatggcgtaggcaatgacctggccgagcgtgatggcgacaacgttgatagtgacgcatcggccgcggaggacggtcggcgagagctcgccaatgtagagcggggcgatgcacgaggcaatctatcgtcagaaagcgaagagggtacatcgtcagcgactgcccaacaacagcgcatcctcgcctgagtggcacgcacgccgacgccgagaccaatgacgaaacgaccggcaatcatgccccaaacggtgtaactgacggcctggccgatagcgccgccgataaagatgaggttcgcaaagccgaggacccacttgcggccgacgacgtcggacccgacgccggcagccaggccgccgatgagggcgccgagcgttgtcgagctcgtgatgagctccttctggccgttagacaggacggccgggccgaggtcgccgccgatcgagatgagggcgccagagatcgtgccagtgtcgtagccgaagcagagaccgctcagggcggcagtcgagatgagcgcccagacatagagcgtgaccctgggggaggaggaagacgctgcgcgcgtcagcttgacggccacgcgcgacgcagcttgagcaggcagaagagacgcacttgtcctcgccgtaggcaaagacagccgattcgtcgatctctttgatagcagcgctcgagcggacgacgccgctgtcgctctcgtcgaggatgctcgtcgccgagcgcttgtcgtcgaaatcgagcttgttggcctcgccgagcggcgacgaggtctgaccacagccgtttagcgtgggcatggctgatgccgcgactgagatgtcgtcggcggtggtgccgttggatgcagtcattgctgagcgcgggaaagaggaaggagggaggcggaggaggaggaggaggagaaggtgactctaggaagagctaggttgaggcgggtccgtgtgttgacaaggggtcctctatcgggttgctgtccggccgggagcagttgtgtggtcgcccctgcgaagacgcaacatcggcgaggtcagccagacggtccaagcagcatccagcagttgagcagcaagaaggtggccgaaccggtgaggctgaggagggggccagacaggggaggaaaaaagcggcgtcaggagctgggtctcgcgtcggtcgagctgacgaacgggtcaaaggaccgacattgtgcgtgctgctgagctggttgctaaacagtttgaaggctgtgagggtgtccggttctaggcgtcctgtgagacagaagcctgaagcgaggacgatagacgagaaggatgggaggggtgaagggaaggaggcggtcgaaggggaagagaaggaaggtagaagacgacgcgagccaagtgcggccgatcaagcggagagcgcaaagtcacaacagatgccgagaagagttggccgaccgacggtacttgtccacttacccgccagcctcgctctctttcttgccctgtcattgcgccgcgatactcccttgcgagaggtttctctgcttgcgtcgtagtgatcgtccataacccgcacgtactgggcgtccgctctccctcgaggccatcctcgcgaagcatcaaaactggactcctagtcgaaccggaggttgcgctcaagactgagaagcaggtcgttgtcaagcaggaggcattttgcatacgagcgagcgagcgaggggtacaagggttcgaaaagcaaaagggacgggcggcgagaggagcgcgcaaacaggagggtgcgagtgtagcgaggtgcgagaaggaaaaggacgagaggaggaagacctaaaggagagaaggagggggagagcgtgggagaatgtgcgtctagagccgtctacttggtgaggacccagagggcgttgctaccgccgcactgctccttgtcgttgcctgggcaggccgtgtcgcacgaggtcgacttggggccgctcaggctgatgccgcttccgcagtagcactctgaaggcggagcggggcgagagaaaggtcagccggatgctctcgggcggtcgcagggcgaagaacaaggctgcgcaccggagccgtactcgacaccggcctgggtgaagcccttgctgccgcagtactagttcgagggagggaggacaggtgtcagaaggaggtacttgtccttacatccatgagagcaggtcggactcacgttcgtgcacatcgtctgggtcatgccggcatccgtgagcgaggcgccgttgaagagccggccgttctggttgtcgagcagctgcaggggaggcgggaggagggccgtcagtcagcgacacacgcgaatcaaagaaggccgtcatggcaaggacgcacgcagagcttgttctgcttccagccattggcaagcgtcgaggccgttttggcgaccgacgacttgaagatcatgagagcctggccgccgccgcagaacttggacgaatcgccggcacaggctgtagatcgatcaacagcggttcagtcaacagccgcgagcgagaggagaccagagagccagaacgcactcgataggcactggtgcgaggggttctcgaccgagacgtagtcgtcgcagtagcactctgcagggcgcaaagaaggaaggggggccgtcagcagatgcgagagaggcccgcgaggcgaagacggcaagaggagttggacagaccccggccgaactcgacaccagccaccgaaaagccagcgttggcgcaatctgcaggaaggaacgaaggcgattcagacgggtcggccccggggcggtcgacgaccgaagaaggagagggactgacgcgtgctgcacttgtcgtaggtcatgccgtccgacttgaaagagcagcccttgaggagccggccgtcgatctcggcgactgaaggagggtgtaagggaggtcagcgtgtgagcggggcaagccggcgtgaggcccgaggaagactcactgcaggcgccgttcgagtggtagccgttcgagtcggccggagggcgcatgtcgccgccgtagacgacggtcgggacggaagccgggaccgagactgaggtcgtcgccgggtaggtgatggagaccgaggtcgtcgccgggtaggtgatggagaccgaggtcgtcgcggccggcgccttgatcgaggtcgacttgggcgcgcagtcggcgttggcccggtcgacgcactggttgtactggttggtgcagtcggtcgtcgtgtggccccaccagacgagccaggagcgggtgacggcgacggcgttgcagagcgtccgctgcttgttgcacgagtaggtgagggccgggaggaggctgacgaacgtctggctctcgcaggagtacttgctagtgtcgtacttgttggtgtagacggccgggcaggtcttgccgccgagcgagccctgccagttctgccagttgaagctgaagtcgaagacgccgccgaggatgccgctgataaggccgagcgtccgcttgtcgaggtcggcgtcctgcgaagcgggcgcgggcgcggcgacggcgagcgaggcgagcgagagggcggggaggaggagagcgacgcgcatggtgaggggcggtggaagagaaggcttggtaggttgggagggagagatgtgtgatgaggagctgtagggagaaagcacgacaggcctgcaattagccctggctttataggaatcatctcggctcccttgagggcttgagcaggccggctgctcgccaaggatgccctgctcgtcccgcagatgcccgctcatccgcctctgcggtctcgaccgtcggccggccggctcggggtcgacgaacaagcactttggcagccgtcttcgtacgcgttagccctgccagtcagacggttagcggacgtagaaagaggcatggggaggattgcccgtgccgagacgagtctccaacgggtcgacggggagacgatcaaggggtgctggtcgaggtcgacgaggcgtcgagaggcgtcggggcggggcgggctggcccgcgggcggccaagggcagaaaataaaattaaagcctcccgcagcggcccaagcacgggggcctcgaacgcccgggctcacccgccaaacgaccagcatcagcttccccctgccatcgacccttcagcagagaaggagggtctcggcagcaacacctcggccggtgcagaccggctgcccagaccgtgcagaccgtgcagaccagccaccaccgctcagccgagcccttgtccccgcaagcgggcaagcggtcgcccggcccctgctcactcacaaggctgacctgagctgccttgaccagcgagatgagctgcttgccgctgctgcccaaactcgaggggttcggatcgtgaatcgagctggctctggtcggtcgctcgatggtctctgggagctagctcgcttgccctcaggcgtctcggctgttgccggcggcgtctcccttctccgtctcacgctgactgcaggctgctatgctccctccccatttgcagcccgcctgccggcccctggcgggagatggcgctctgttcgcttcccatctggagctgaaagggagcaggcctgcgaaagggttgtccgcgacgttctccatccgctctagctggtcggcacctccgggctgcgtcgacccgctgctggcttcccgggaagccctctggccgcaagggccgaccagcttgggtctggagcgtcgccgtcgtcttatcagacagtctcgctctcgccatcgaactcagactcgccaggggacagctgaaagagtcgttgtgcaaggcagtctggcgactggagggaggtcgctgcgcggccgcacgccgtcgagagaagtgagctctgagccgacggcctgcctgctcatcccgcaaacgacgaccgcctctctcccacacctgagcatgccagtctcatcgtcggtccagcagacactccacgctttggccgacgagcttgcggctgcctacccgacctctggcaaggacggcgtcgccccttcgcccttcccggcgttcccgccgccgtcgagggccgccttccgagctcgcatcgccgaggcgagggacgctgtcgagcgcttccgacccgtctggtcgggtagcggaaccgtctcggtcgacgacgagagccggatcaaggcgagcgggtcaatgcgcgagtggtgggtgccctcctgaagaatagctcgaggctggacggctcgatgaggctgaccttcacgccgttgctcgaccttagggccacaagcacggctctcctcgccgtcctgccatcgctcgctcgtcttaccactgggcccggctcgctggagacaaagacaccattcgctctaccgtcaaacgtctcgttgccgtccctcctcgaggctcgcgcccgacggctcgggctcgaggtctaccgcgaaactctactcgacgcagacgacgacccgagcgacagcggcggctcgtcaggcggagcacgcgaggtcctcgtcctcggcggcaaggcgctcgtcgtcgagttggagctggcctcgccggctccggatcctagcgaagttactggagaagctggccctcagcgcgaggagggcctcgggcggtggacgctcgtcaagtcgtcgacgtccatctccatctcgggcgctgctgagcctctcgccgtccctgcgctcgacgcatacctccgccctccgctcgaacggctgctcgctctcgccgcgctgccggccgacgccgatgacgacggacgaccggccgagagcgacacgcccgagctcgtccttgcccgggcgatggccgtctgggagcgtcgcgtgacgaccgctctcgcatcggaagccgtcttcgcttctcgaccgaccgtctttgacgaggccgcctcccttgcctccttggtcggcgctgcgtctgctggcgtcggtgccgtcgaagacctgttcccgtcggtgcgacttggcaggacaaccgtcacgttcgagcccatcccatcgcgtccctcagcagccgcaggcgacatcggacaagcgccgtcctcacgaccagcgttccgactcccttccctcgcctcgagcccattcatcgccgcgcctacgattcctgcagagcccttcttctgggaggccaccttcacgccgccgctcgtcgtgcccgtgtgcacgtcatcggctccctccatcggcaataccccatcggccgaggcctcgctggtcggctcgactcgcctccaaacgcgcggctactggcagccgccagagggtcgtggacgtgctcagcgatggtcgctcgactgtcaaggcggagggctcgaccaggtcgcctttgggcgtgtcgggcttggcagcgctgatgaggcacgcgcgctcgtcaatgtaggctacacttcgctcatgtcgggacgcagggcctgatcaggagactgaccctcagcgcctgttcgccgtgcttcagtgggcccggggttggacctgggtgctcgaatgtgccgagaaggtgctcgacgggaccggcggaccgccagcgccgccaatcactcccgctctgggagagctgacgctcgagagccttggctcgcttgttggttcgtgtcgcatccgatgttgtctgccagaggctcgacttttactgcaactgacgcccgaggaaccctcgtttgaaccagccgactctgccatccccatcgcactttccctgcccccgtcggtcactattccctcgatcacgctcaccgtgccgcatccttcgcaaccgatcgctgtccagatcctgctctcgcccctcgctatgacctcagacggaccttcggcaggagcgcgcatcgcattgcgaccagtcgagctggaggagcgtgtcggccgggcgaggctcgattcgctcggcgagaagctcggcggggagggacacgctgtcgtcctctggctgatgcgccgctttgaagagctcgagcatgagggtgatgagccggcagaggacggcaacagagactcaaagcggatgcgcatcgactaggatcgatgccgactttcgctgaagcctctcacgagatgtgccagagtccattgctatttcctccgttatcaggcgccgagcacccgccactggatgtcctcgagactccggccctcgagcaaggccatgaccagcttgagtttgccaagcagctcgcgccggagatcctcgccgttcggccgaccgaggtcttgctcgagcgcgccggcccggatagagcggaccgagccgaccgagccgtgaagggctgctcgggcgtcaagtcgtttgagcgtctggaggaggtcggggtcgactgccgagcacgagtgaaccgtgttgagcaggatgaaggcgccgcggtcgacaagctgcagacgataagatgagggaggcgtcagctcgtgcaccaagtaacttggcaacggccggccaactcaccccggcatgcacgcggttctcgatccgcccggccgagttgacctgctgcggcttgaagagggcgagcaagtagcgcaacgcgtcgtcgcgctgctgcacggcgtcgaccggatggtcgagcagcatctgacaggcctcggttggatgggccgtgatgatgtcggtcagggtcgcgctcgcgcagagccggatcgaaagctcgttcgctgacgtcgctgccgtcacgagcaggagattgagaagcttccagccgcgcgcgaaggccccgccagccggggcgaggcgcgcgggccgcttgccctgggacttggctgtggccgtcgaagggaggccggcggccgcgtttgacgcatcgaccgggtcgtcgagtgcggcagcgggcccgatgtcggtcggcagctccaggtagcggaaggccgccggcgactgcgaatgaaagaggcagtagatgagggcgttggcctcgcggctgagatagtagtcctgtccgacgagaagctgcaaggtggaggcaggaggaatcagttgcctcgccagcgacggcagcagagacccagatctacgcacccgttccaagaagcgcatcagctcatagccgtggaaggaggcgatctcgtccgtcacgtccggcccacagcacgtcaagctcttgagcgcagcgagtgcgtcggccttgagcaggccggggaggatgtcgcggtcggtgaagaggaggagacagatcggcgcgacgaggtcttcgacgggtgagatggtcgactcgagctcctcctttgtcgcgcccgtcaccatgagggcgaggccgtgcagcgtctggaggagggcgccctcgagcgacccgaggacctggtcctgccggccactcttcggagcagcagggagcatctggcctgacaccaaggcagaagagtcaaagtcagccagcgagtcgcagacacaccaggcacgtcgaggccgcactcatcatccagagcgccgccagtgggccgccctccttccggagctcctcgcgggcgccctcaatctcggcgagggcgcgaattgtcggcccaatgacctgggcgacctcggcgccgtactgctgcgagacgcggacgaggatgctgatgatgctcgccgagacgagaccttcatcgagagcacgaaaagtcgatcagtcgcaagacacgcacgcagcgttgcgagctcagagaggacgtacgctctgcccggcggatgacggccgagtcttgccgccaaaagtatgtcatgagctcgacctggtagtcgtcgtcctcgccaccgtcggccgtgagctccggcggatcccgcgcagggcactcgaggccctgctggacgctcggccggaaggcgacgaggttgtgcaggatctggcacatggcgacgaggaggccgacgtcgcggtccgagcatgagcagacgaggttgaacaagcagccaaggaattgaacgttggccgcgagcagatccttgacggcgtgtcggacagagagggccgcgagcccaaagaaggcgccgaggaaggcggacgagcccggcgggagcgagcggtgcttgtcaaggatggcgacgccctgggcgatcgagaggacggtccggccggcacgcttctgcgtcgcaaagacgagccactccgaaaggaggacgtcgacgtgagccgacgcctgggcgagcgcctcaccgtcggcttcggacggagcgtggccggccgcagcgagggcggccgccgcgtccgagaccgtcatggcgctgatgtcgatcgccggcggctcatccgacgctgccggctgcgacgctgacctgttttgcgagtccgagtcgccgccgccaccgttagccttggccgccttgctcttcttcttcttcttgcgtcgcttcttgccgggcgtcgccggcatcggcgtgccaccctccgactcggcgccgtcctgatcccaattgatctgcggggcgaccgagaccatcgagacgtcgcccatgtgctcggcctcgtcgagctggaaggccgccggtcgcatcagcaggggatgcggctcccggcttgacggtcgagcgggcagcggtaacgccgcgagaccgggtgacggcgagagcgaagcagcggccgccgcgagcgagaccgaggccatttgaccggtaagttcgccctgctccgaagggctgccaacggcgggcgagccataccgcccgaccgtcagccgagcgccatcctcctcgccgtcgaggctgatggtcgcatcgtcgtcgtcgtcgtcaaacgtgaccgagccgtcaaagtcgtcgagctgctcgccagcctcgccctcgccatccgtgtcctcgccgacggtcgcgagcagctcgcgcccgagccggacccggacgcccgccgccttggcccggagctcgaggttgccgctggcgttctgatactgctcctcgagccagcgagggacgtcgacgtcgctctggagcaagagcgcgataccgtccttgaagccgatcagcctgccgaggagtatcgtcagggcgagcggaagggctgccgacggcggcacgtagggtgccgttgaggacgacggctccgaagccggaccccaggccgaggccgcagtaaagaggtcaaagaggagcgccggccgagcaaggatgcgaatcgcagccgaaggcacgacgtcgacgagcttggtcgcaaagccgacggccttgcagcggtcgacctctgacccagcgcggatccattcgtcgacgacgtcgccgaagcacgcggcgaggtggccgtcgagctcgagcgccttggacgccgtcggccgcgagagatggcagagctcggcgagcgcgagcgctgcaagctggtgcgggttggtcgacgagggcgaatggaggaggctgaggagaagctgagcctcggacgtcgtcaggaggggcggcgtcggcgtggggacatctggcagaaggagccggaagagcgactggagcgtcgctgggtggtccgcaggaggggcggtcaccctaggcaggacgagcgcagggagcggagcaagcagggagaagaaggcgtcagccgtgagcgcgtgcaggagcgtcgggcgggcagcagccgacaggaggctcgactcaccgagcgggtgggtgcatggcagccaggattctctcagtcggtcggccgcaagtcgccagaacctcggagccgtgtgagatcgtccggtctgggacgcgtacttacggtcgcgcgcgtctcttgctgccggtcgaggcgggcggttccggcgcggtcgctgcgaggcggcggcctcttgagattcttgctcgtcaggcagtctttgagcgaaggagtcctgagcgtggtaaggccgtcgagactctccgaagcgacggtctcttgagaaggttggagcgaggcgagatgatgggtctcggctgatctcgcgaggctgctgaagcaaggggccgcagagagagcttcgggacagggcgatgcatctcgacaagcttgatgcgacctgcgcaggctcacatttcgcgcaagccttcccgagcggctgcgccgacggcccgaccgacaaccgacacacgcttctccagctgccctctccactcgctcgactggctcgctctccatctctcagcagcagcagcctctcactcactccgaccactagcactctcacgcacccgggcgcgccgcaacgctctagccgacgatggagaaggtcgactacatgtgcgtcctctcgtccgaggctctcgtaggccccaggttacctgcgggtgttagaggaagctgaccagctcaactctaccctgctcaacaggctggagcagatgctcccggagcttcaagacctccaggagaagaagctcttctcgccggtgcgtccgcgtcgtagaagctcggagccgcctgcgcggcgcgcagactcttcgcgggctgacctgactcgctccttcccgctccccgactcgacaggacgagatccgcgagatcgtcaagcgccggacagcttttgagcgggcactcatccggcgagtcgctcgcaaggaggactttctccgctatgccgcgtacgagcttaatctcgacgccctgcgcaagatgcgcatcaagcgtcgcagtgcgttcagcctcttgctcacggtctctgtcgtcgcctccatcgtgtctaacgaaataatttctcccccttcctgcggcccctacagagaagggtgaagtgcagccgtcaatctcgtccttctcgcttcagcgccgggcgctcaacatctttgagcgggcgacgaccaagttcaagggcgacgtcgggctctggatccagtactcgcaggtcgcaaaggcgcaaaaggcaaagaagctcatcggccgggtcctcaccgacgcgctcctccaccatccgacaaacccgacgctctacgtcctcctgtcgaaccaccagctcaacgacctgctctcgcccctctcggcccgggcgctcctccagcgcgggctccgcctcctgccaaattgcctcgcgctctggtcagagtacgccaagatggagctcgtctttatcgagcggctccggcggaggtgggccgtcctcggcgtcgctggccaggccggcgagggcgccgacgagggcatggagtcagaggagggccgccaggttatcatggccggcggcatcttcaagctcgtctgggagggcgcaaaggccgcgctcgaggccgacgagaccgtccaccgggcattcatcgacctgatccgtgccttcccgacaccgctccggtcgagcctgctcgaggacgtcctttacccgtcgctgcgagcctcgctcccagacaaggcgtcgacctggtcgctcctcgcccagaaggcgctcgtcgaccggccctatccgctgccagagggcgtcgaggagggcgcgccgctcggtccgcgcgagcaggtcgacgcgctcaaggagctcgtcgcgacattcaaggcgggcttggccgtcctcgagggcggtgagcgggtacgcggcgctgaggagtgggcgcagttgctggacgagtggatcggccgtaccgaggagggaccgctcgtgcgtgctcgctctctatccgtcatcacgcgtacaagatctgaccccctctcgtctttcgactgcagaaacaatacctcgctcatcactttacgtcgctcctggcaccgccgctcacgacgccgacaatccaggccgaccagatcgccgtcctcaccggagccggctcggcaagaacggcgctctcgttcgcacgaaaggcgaccggcctcttcccgacttcggcgctcgtttgggatgcccgactccgagctgtcttggcgctcgaccccgagcatgaggcagagagcgtcgtcgcggcagccatcaaggtcggcctcgctgcctacccgtcagaggacgatgacgacgaggaagcggagcgcggcggttgggaggcgctttggtcggccgtcgccgaccacctcgacggcctcgagcctgcgagcacgcgcgacaaggccgtccacgcggtcctggcccagtcgctcgtcacgccagcgacgaccccttccggctcagccgtctcgtccctgccgattcacaaccacctgctcgccctcttcctcccgatcctgcacccgatcgccaacccaccctcgacggttgcccggctggcggcctttcgcaagatccacacagcctacctcccgacgtcggccttctacgcctcggccttcttccacgagcagctcttgcccgacccccggccggtcctcgacttcctctttgcccagtggcaggcggccgcctcgcgcccgtctggcgccgagacacatcaggccaaggtcgcgcgcgaagagtcggagcacgagtgcttcctcgcctacctcgagtatctccgcggcgccggcgacggcaaggccgttcgtgaggtcctgcgctcgctgacgaaggctgttggcggcctgggtgtgtgcgtcgaggagcgctggcggattcggctcgatgagcttgagaaggaggaggcggagggctcgagcagcgacgagagcgagagtgaggacgacgaggacgaggacgaggatgaggacgtcgagatgacggcccaatagatgccagtcgacgaatacagaacttcacgaggatacctcgatgtcaaccggaggacgatatcgactcagacagctcaaaccaagatctgagtcttgatctcgtaaagctggccaagccagtctacggcccatttcgcttcccttttgctgcccctccttcctttgactctctgttttggccgactggcccttcctcgatcgctttcgctctgttctatctccctggctccccgtgtgacttccctcgtggccgaccctttgatcgagcgagtaagactcaatgcgagaagcctccttggcggtccccagtcctcgaagcaggactcagggcgaggaggcttgtccggtccaaagaccatgagataagtcacacgggaagccagagagacagagagagtacaaagcgggagcgatcgaggaagggacagtcgggccgagacagagagccaaagggaggagaggctgtcaaaaaggaggcggaaaggtggtgcgcgcgcgaaagaagaagggaggggtggcgagatgggttggagggagggcgaggaagaaacgctttcgctgcgaggcgaggcgctttcgccgtccaactagatggaagccgagccggatagagggggccttgacccttacacgatagcgttctcgccgccgcggtacatgatcgagagagcgttccagccgccgcagagctgagtcttggtcttgtcgcccgggcctgcagggcgagcgaaagagagagcaaggggtcagcggcggcctcggcggacgagaggcgacccaaagcggcaactcacaggggatcgtgcagcggtccgaaccctcagggtgcttgccgttgaactccgaggcgtccgcgcaatagcaaaagaaaccgctgaaagagaagagcggcgaggcgcagagaggaagagagacgcgcgggggcggccacaagcggtcagtctcgaaggggaggacaagccgagccgaaggagacagagaggacgaaccccccaatgccagccaggttcttgcccttgccctcgcactttgcggcacacttggtgtactgtgggaagggaaagacaggagagtcgtcagggccgtgcgtcgaccggcgctggccggagcgatcgaaggacaaggcgatcggcgtacagtcatcttgaggtcccacgacgcgtattccatgagcgggtaagggttgttgtcgcggtctgatcgagggcagagggatcacagtcagcctccgcggcttccggctcggcgacgagatggacgacgcgactgactgcactgggcctggtactgccaggcgggctggccagggacgaccattttggcgtagaccttgggagcgggcggcgcgggcttggtctgggtcgtcgtcaggatcgacaggcgctgggagtgcagggatcgagtggaggcgtcagccggcggtcctcctgctgaaggaaaagaggtgggcctacctcgtgtccgccgcacttctccctgggtccccaggaaaagttaactgggcagtccgtgttgcctagagcgttgccgagcatgaattagcctttgtttgcgggaggggcaggacggctagccgaggtcgagcaaaggacgcacaatcctcgaggggcttcttgatgatccgctcgaggtcggtgacagcgccgcagctgcaggtcttcgcactgcgagaacaagcaagtgaaggtgaagagggtcagcgatcacttaagtctacgccgcgtaggctcggaccgcgcaaggcagcaggacggactcctcgataccggcggcctgccagcccttgtcgtagcactgcaggcgagtcaaacggcgggtcagtcctccggtccgaggccgctcgctagacagctcagggagacgtacaaactgggcgcatttggcctgcgtcatcgcgaggtccgtgaacgtgtcgcccttgaagagcttgccgtcgaggttggcaggtgcgttttggagctgagcgaggagcaaggagcaagcaggcgcaggcgcgtcagcaggcgcaagccttggtttcagcgcagactgaggaattgactcacgcagaggtcctcccggtagtcgaagccgccgggcaggccgccgtaccaggtgcgagtctcgaggtcggccggcgcggcaggggcggcgagagccgacgtggcaaaggccaggaaggggaggaaggcgatggcaagcatgcttgtcgagtggtgtgggtgggtgggtttggggaagctttggtgaaggtgaggaggtgggtggttggcggatgagaagagatggagagaacctccctcccaggccgactttatagccctcgggagcgagcggtcccgggtcggacgatgaccttcgatcgccgactttcggcctctcgtccgagcgtggtcttccgccctccttcgcaagggggaggggtctcgcgacctcggcgctgggcttcgcctgtctgtctgtccgtccgcgaaggaggtcgaacaggtcccggttccgggagcacgtgaggccatgtggtcggcttcggaccgattaggttggttggtggcagataaaggtccgcgtccagacgaggcgtcgaagaacgcctctgtgaaggggagcagtgaaggagcgcctcccttcgtcagcccaacagggatggtcagccttcatcagcatgcggtggggtcgtctccccggccgcaatcaggctagaacgtgcaggagaggaggaggatcaaaggcgggcctgggtttgggcaggagcggcgtcagttccggtagagcgcccctctgaccgccgccggtcgcccgcctcgccagcgaggcgtccgacgaccctccacctgcttgtgctgctcgaggcgccaagctgagtggatgcttccatcataggcggcgggcgggaagaaagacaagggaagaccgcctcgtgaccgtccgtttgctgcacgccccgggcaggaagaggaggcgcaagcaaggttggccgggcagcttctcaccgggcgaggcgtcttcgaatgtgaggccagctcggctacctcgacacctccccggccggacgtggcgtacagacgagcgagagtcggctgggcggggagcttcggaaagaggcgcaaagtcggtgtggcggcggcgtcgggaagcccaagcagatcgaggtaggccggcccttgcggtcggcgggccggccggccgagagggcatccgcggccgaccctcgtcaggtctcttggagggaggatgggcagtcagccagccgcaactgtcgtgcgacgtcgagcaggaaggttgagtagatgaaggacgcggaggacgacgaggatgggtgcgagaggaggaggtcggtcggtcggcgggcgggccggggcgagggcgactgctcaagaggcggccgagccggcccgaaggcgggccgggcggcttcggccgagccacggctctcgatctagagggcggctcgagcacggcgacgagaaaatacgctcgaggccgaggagttccaagtcgaacgcgtcgagggccactaggccacctcccctaccccttttcaggtagaccttttccccttcttttctctctctctctctcgggccattctcacgcctttgcttgttcatactacacttccgcacccgctgctagaatttacatgtccgcccgcactctgtcggcgagctcaccagatccttgtcgcctccctttatacccgcttgcatcgatgcatcgcttctttcgcctgcaccttggtctcgcccgagagctgttttcgttaaagttgctcagcgcgggctgacactttcgactctgatgcttgcaaatcagatggagagcataatccacatcggtcggagcgacttcccatccccagcttgcgacgagtgcacaccaaggcagtatgccaattgacatcaggccgggccagagcaaggcgacgcgccctgccctgctagttaccccttgtccgaccgcgaccgcccggccggagacctcctgcaagagagcagcttgtgctcgccagtgtgcccttctggatgactgcctaaccgtcgggcgagggttacgagagagagagggagagcgcgtcggggcagactgcgccgacgctcgacagatggctcggccgaagccgcccggcccgccttcgggccggctcggccgcctcttgagcagtcgccctcgccccggcccgcccgccgaccgaccgacctcctcctctcgcacccatcctcgtcctccctccctccctacctcccactgccgtcccgctctggcctgaccgacactcagtgactacctctaccgctgaccagggcttgtctctcatcgactcgtcctctctcgttctgtcctctgctctctcgctccgtcttgctcttgggtctcgtgctctgtcgctctgtcttctcttctggtctcgctcgctctgtctcgatggctcccttccgctgcatctcgtctgctctctgctgcaagtgtgtctccgtcgaagcggcaagggcctcatcgcgcaccttactcgtgcaccggcgtgtgatgcgcattcgggcctccgaccgacgcgcgacgcctgctcgacctaacctgcctcgctttctaatgtaccgccatccaccattcacactcatttcgcctaaagccttgactggattctctgcatacgtagactcgcctctccatcggcgctaccagggagctcggactcaagaggctgccgccatcgtcgtttcattcggtcaataagcccgctcgacgcgcctcctttctctcaacggaccccggccagccagctgctcatggcgaccatctcgcgccggacaacccgtgcgtccgcgcgggcctctccagcgccttcggtcgacgaagatgagcctgctgcggtcgtcacgccgagagcaagcggccgaagtcggcggacgaccgaaggtgctcagcagaggacgccgcagcccaacgacccggccgccatcacgccaagcggtgcctctgaacgacttggtacggccagcgtcgctcgaccggtcgccctgaggaggcaggtcaagcagtcggcgtcggcagacgtcctcagccaaaacggcgagggcgtgacggcgacaggcctcgcacctcggcgcgtaagccggtcgtcgaccttgcgtctctcatctgcgcgtcctagccgtcgcgctgcttccatcgccccgccggagctgccggctacgttcgagtcagacgcggacatggtggcggacggcggtccttcctcgccagataagtcggccgaggacgacgaggacgaaggcgaggatggggaggaggacccgctggagacggcgctgcgcaccaacccagacgcgctgtggccgatcctcggctcgtcgatgcgtctgctcacgcactacttcggctcgctcgtccgaccgatgccggaggacctgcccgacgtctactaccagatgatgctcgaggcgatgtcggccgctgcgccagcgctggcgctcgactcggcgccgtaccagctgcacaccgcaaggcagcagctacgcgtcgccaacacggccatcttcctccgcggcatctggctcaacgaggatcagctcgccgatggtggcattgtccggccagagaaggtccgcgactttgccgaggcccgcagtgtcttcctcgatatctttgctgggccgggcggcgtcgcactcgacgaacagcggctcctcctctttctcgagttgtcaacccaggtatgtctgagagctcttctctttccctttcggatgatagctgaccgtccttctctctagctgtacatcctccagcgccggacgaccatccaccggacggcagccgcgcgcaacgccttggtcaagcagttgttcccgccgaacctgattgccaaccgcgtcggcagcaccgtaattgccgctcaatggcgtgagctttgccaggaccgcgtcagagaggtcagtttgtagcggtataccgagtacatactggagctgaccgccggtctcccccccgcttgccttgctagatcaaaagattgtcgctcgaagatctccggcttgagcacccttaccacgacactcgctaccgcatcgtctccttctgcaagtcggaacatgagacaggcgccgaagtcggcgaggagctgggaggaggtctcgctcggcgggccagcggctcgaggctcagcttcggggccatcgagaaccggcggagcacaagcgtcgctcggagccggcacagcgaggtcaggataactgcctggcattggctctgaactctttttgagcactgacctgtcgaatcgtctctttcagcctctccgacggccccgctacacggccgaccttcccgctcctctcggcccaaagccgtcgccgctccggcagggccgtcagtctatgccggcaggtatgcagaggctctcttcccgtccgtacacgccgtcgaatccgcggcaagtcgtccgccgaacgccggtaatcaatattccgccggatgaggagagcacggccgacgaggccgccctccgcatgcagaacgcaaacgaggtccagactgaggccgatgagggcgacgacgacgagcttgtcgaagacgagctgagcgagcgagagacggaccttgaggacgagccgtccgagatggggcaatcaagagacgtcgaggtggagtccgacgacgaggcccggtcgcagcttgacgagggcgaagcagacggcaaccacgacaccgaccttgacggggaggaccgctccgatgcagccgatcatctcgcaggcacgccgcggcctgcgccgcgagcctttcggcctcgtgagggcaagcagagagcggtctcgccgaacgaccgcgccggcacgcctctcgcgcgtcgtgcggtgagctcgagcggcgatgcgctcgctgtgtcagctgatgacgatgaggatgaggtcgccctcctaacgcaggtcgacggcagcgagtgagtgggcccagctcggcgcatgcgttttaaatgctcgatgctcacagcgctctcccactacgttcaggtcgcagccaaaggcagatgaagcggacggtatcccctgggacaacctttgggacgatgagggtgcgccacttcttacctcacccaatgctcgacgcatgcgtaacagctgacatctctttctctccagagtcggcgcctttcgaagaggagccgaaggaggacgctctggcatcgcctccaccacagctcgccctgcaacccgaagaaccaccgtcaacagtccggctgccgttgcctaccgctccgcccgccgcagaggcggttgagaggccagttgaggcagccatcttgacttcggcccccgtccctgcacagcaagtcgatgacagcttttatcaagacgccatgggcggcggtgcctggtcgcccgagccaaagcagcgccccgcctcgcctgacgttgccgtgccgtcacagcaggcgcccgcgcccgcgcccgcgcccgttcaggcgccagcagctgtgccacggtcatcgaccgctgcctctcggccgccgcagccgtctgtggcgactcggcaacggccaagtcgggcccgaccgagtcaagccctgcgcgcagacttttctccgctcgacgccagcgatgaagatgagcgccgaactccggcccagcctccgctccagccgccgaggtcggtcaaccgccactcgccgatcgacttcgacccaccgccgcgcggcagtaagcggggggccaccaagagagacgctcgcgcgtctcctccaccgcctccgccgacgccgactcgcgaccggagcgtcatcggcggcggtcggcacttctggaccgaggacgagacgctctttctcgtgcgcaaggcgatggccctccacagcgagaacaataatccgtttgccaccctcgtcaggtgagcctactcatacgtctactgcctcgatgtaactgctactcacgcgaccgcgctccccccttccctagaaactacggcacgaacggccggaagaacatgaagctggccggacggtgcgtccacctttgactgccttcacgcgctcctctcatgcgctggtgccaaccaccctcctccttccctcaggaccaacgttcagctcaaggacaagctccggcattacctcgcgacgtcgtacaagtacccgaagccagtcccggccgggctcgtgcgttatctcccgacgagcgacccgcggtacaagccctcgcaccgggcggtgacggcatcccagactgaagcagccggcccgccacgaaagcgaccgcgggacgagcgcgaggaggtgcactcggaccttagcagcggcagctcgggcgagagtgacgacgggagcgaggccgcgtcgatggagagcgagggcgagtgaggtcggcactttgatatcttcagagtcttgtcgcgtaggctcggtgtagaggtcggcagcagtgatgcagaagattcgacagacgatctctcgacgtgcagtgtcatgagtcctggccaagacctgtctggcgacgtgcgtcaatcgtcgccccgctcgaccttccttttgaccgtcacccagccgacaaaacctcttgcgctcctcttcccgaccagacgcctctctcagctccatttccaatgtcgaccgactgcgctgacggctcgtgcccgccgctggcgaccgctgctgctccggaggcctcgcgtgcgtctgtccatcctgaccgagctgggctcgtcgtctccttaagcgaccaagtgccagcgactcacgctggtctcgctcaatcccctcgtcaagcagccagctccgatgcgccctacaaagcgtctgactgtacgccttgctttctcgtccgcgcactccatgcgaccggcgacccctccagctgacctctccaccgctcgccgctatccctgctgcgcccctggctcgctcctcagccgctccggatcccgcctccaagccctccaagaaggctgacgacccggccttgcttgacgcgacgacgttcgtcgccccgcacccggctcagcagccgggcttccgcgtcgtcatcgagttttgcgaccgttgtcggtggctgcatcggtgcgtgccgggctccccccgctctcgcagtgtaccacattgacagcaggtcgtgctgaccttccatcatcctcttatgctttgcctgtttcagggccgcatggacctcgaccgagctcatgctgaccttccctccgccggcggtgacgagcgtcgccctcatcccgctcaacaccgaggagaccggcggccgtttccgcgtctggatctttggcgaggacgacctcgtcgagctcgtttgggaccgcaaggtacgtcgacggcgagaggctctcctgcgatgcccggctgacgggattctttttcccgatgcgccagattgagggcggcttccccgagctcaagcacctggtctgtctcccgcccctgcgcgctcgccccttccgttcaatgattgctgacaagacggttctcatgtgctcgcccctccctgcagaagcagcgcattcgagacgttattgcgcccaagacgtcgctcgggcactcggacgtccacggcaagtaggaacggttgcactctcagccacggcaccgccggcgtcaaaggtaaccgaccgtcttcgagccggagcgcatgttacctccgggtaatctgtcgtcggccttagcgtgggcggtctggcatggccgtcgacgagcactgcagctggctgtgcatcttggcagcccaacaagcaaggcgagccgacaccgctgtctcgcaatcagcagtgcgggacgcccggcggtcacctcaacttcagggccaagcgtcttgttcggggagacgcccgcatcttgtaattccctacgtcctgtcacctctccttgtatctcatgacgaccgtcttctctcgtccggcttgagcgggccctcgctgaaaggcaccctttttaatttaagtgcctcggcttgcggctggccaatgcccggcgcggagagtcgccggcgggcgcgcgtctgtgcagcggcggcagctcgactttcgtccctcgttccaccaccctcacctcctgccccgatccgccctcctctctctccctctttcacctgctcctctttcctccatcctcgcccggccatgtcgctccctccctgcgtccagcgcttcaaggccgtctgccctttcctctcgcagacgaaaaactcgcagctccggtcctttgcctcgaccccaagccccctcagcccggccttttcgcgcctgacggctcaggcggtcggctgcccggtcatgggccctgcgctcgagcaggtgcgttctcctccttctctggatcctctcctcttttctgctaaggccgtagtgctgggaggagccggtggtcgctcggtcgagctagctagagccgatgcgcgctcggcggcctgccattggacctcgattgccctgcctgcccaccaccaaacccccttcgtccctcgatgctccctcctcttcatcccgaagctctctagaccacctctctctccttgcctcgacttctgccgacgccaggcaagctcgtgctgaccatgcttttcccttcctctccttctcgatcgtccctgcggtggtatttttaccccctctctcgctcgtcgcctccgatgccttcgttcctcatcccaggccaacggcggacctctgccctctggctcgtcgcgctcgttcgctaccggctgcccggcgagcggctacgcacctcagctccagtcggccaaggccaagcagccgtcgctaacgacggtcgagcagatccaccgcgtgcgtctctattgcgtgtttggtcggccggcgtgcctctcgtcgtcgaccgtctgttgccgctcgaaagatcgagcttacccgtcgacccttgtgcgctcgctctagtcccagggcgtgatcctcgacaacgtcgccttcacgggcggaaagtgcccgcacgcccacctcgctgcccaggcggtcgccaaggttcaggccatcaacgccgacaaggcaaaggcttccaaggtcgtcgagatcacggcctcgggcggtttcaactacgaaacgttctatggcggcgagctcgacaagaagcacaaggacaagtgagttcgctggcgcgcgcgctctggccatgcccgggcccgatcgctgaccgccgccctccccttccaggtcgtaccgctacttcaacaacatcaaccggctcgctgccaaattccccatcgcccacacggcgaacccgcgcgacgaggtcaacgtttggtgctcgaacgactacctcggtatgagcaagagcaccgtcgtcgtcgagaccatgaagtacgatcgacctgccgctttttgtctcgccatcgcggttgactgacgcacctcttccccctctgcaggcgcacgctcaacaagtatggcgctggcgccggcggcacgcgtaacattgccggcaacggctcgctccacctcgcgctcgaggacgagctcgctgtcctgcaccgcaagccggccgccctcgtcttttcgtcgtgctacgtcgccaacgacgcgacgctctcgacgctcggctctaagctgcccggctgcgtctacttttccgactcgtcgaaccatgcctcgatgatccagggcatccggcactctggcgccaagaaggagatctggcggcacaatgacctggccgacctcgagcgcaagctcgcgctttacccgaaggagacgcccaagatcatcgctttcgagtcggtctactcgatgtgcggctcggtcgcgccgattgccgagatttgcgacctcgccgagaagtatggcgccctcacgttcctcgacgaggtccacgccgtcggcatgtacggcccccgcggtgccggtgtcgccgagcacctcgactttgacgcccactttgctgccggcagctcgcccgacgcgatcccgggctccgtcatggaccgggtcgacatcatcacgggcacgctcgcaaaggcctacggtatcgtcggcggctacattgccggctcggccgctatggtcgacctcatccggtcctactcggccggcttcatctttacgacgtcgctcccgccggcgattgctgccggcgcccaggcctcgatcgcctaccaggtcgagcacattggcgaccggcagctccagcagctcaacacgcgctcggtcaagactgagctcgcgcgcaagggcattcccgtcgttcccggcccgtcgcacatcatcccggtcctcgtcggcgacgccggcctcgccaagcttgcgtccgacacgcttctcaacgagcacggcatctacgtccagtcgattaactacccgacggtccctgtcggcgaggagcggctccgcatcaccccgacgcccggtcacacgaccgagcagctcgagcacctcatcagctcgctcgaccaggtttttaccaagctcgagctcaagcggacgagcgagtgggcggccgtcggcggccgcgctggcgtcggcgcaccgggcgcgaccgccgtcgagccgatctggaacgacatgcagctcggccttctcgacggctcggccccgcgcatgctcgagggctcgcgcaagatggcgatcgacctccgggcggccgaggtcgcgctcggccgcgtcagccggctgctcggcaagccttcgatcaaggccgactcggtccacgttgcctttgactcggccgaggtcctcgacgtcgagagccagctcgcctcgatcgagcaggtctcgcgcaaaacgattgaggctcgggcttgaagcctttctcgtctgcctgccggcgctcactcggatgttcgagttgtaatactgcatgaaccactatcacctcatcgtctttcggccttgcgtgacagtgagggttgctggaaaggagggttggttggggtcaggctcaagagcgatcagagcgcaatcggctctaaggcgagctcctcggtcgagtgcaggtccgacttgaaacccagcttgccctgaacaagctcgtcggtcgtcgtcaaagtcagttcgtcggcagacgtgacgcagaagtggctgcgcgtcggacgagcagcggccagtgcgagtgaggctcaacatcagccggaggacccaacgccagtaagctgggggctttgtgtgccacggccgcctctgcccgagccgggtcaggactttaggacttcctcggcagaagaaggcgtgagacggaggctggagctctggaggctgagagtcaagctgaaacgcctcgaaccggccggcccaacctggtcagacgacctcgggccgtcgggcaccctacaagaaggtcgggcaagccccccatcttcctctcgaccctccgacacccatcacaccattctcccctcagactctactatagccaaactcccacagcaatgagctcctacgagatcggcgacaagggtccgtcctggcaacgtcttgcgttcacctgcgcgattagaactcgggcgagcaacagcggggctgacgagaccatctcatctcacccgcttcgtcagtcgaggtctacggctcgccccctcccttccggtccttcacgatgattggcgaggtcgtcggcaaggagcaaatgcaccgcgtacgtcgtcgcctggcccgtacggcgagagatgggcgaagctgctccgcagcagcccagccagccaccccgtccccgagcctcaagttgctgaccttggcgccgaccactctgccaggacgagattcgcgacaacgccgggaccgtcatcctcggcgggttcgacggcgaaggttacaagatcaaggacaaggacggcaagaccaagagtgcgtccttggccgtcggctcatcgctcgctgatcttggctgacctggcacgctcttccgtcgatcttccctcttgcagcctacgaggcgccctgcgtcgtcggcaaggcccccttcaacggcgacgccaagtggtggccgtgaaatcacccctccatccccatcaccactgcatcgagcaagtcggaaggcacgccccggcggcctgccctccaagacgaccttgccaacccactgtctcgctcctctctgtcaaccgcctcgttgtagccctgcctgttgtcctcgccatgtctccatgattctatgccacactggtacgttctctcgctcaggcttgaagtgcctcgaacgcatgtcatcggcccttcttcttcctgcctctggcctctttcgttcccctcgaggcgccgtcaaacccgcccagtcgcggagcctccctcgctttcgaggcgatgtgccggaagcgagccggatcgagggcagttccgccggaccactgtatgcagacaatgacgacgtctcgagcgtcctgacgcacacaaccgtcaagtcagctgccggggatgagagcgcacgctctggtctgcagacgcaccattctgtcgaggagggtcgccagaactgcgccagcaccagactctccgccgtcattcttgcctacttggtcgacagtgttgaggaaggcaggcacacgttagcctttgtgaggtggtcaggccttgatagtagtcggctgaccttgctgcgagcctgtcggaccgacaccgagtcgccatgcgtatgactggccttggcgactttccaaaaagggtccaacggtcgtggcagtcgcgacgggtgagtcgttagtgtcgggtcagccgaacggtgagtcgcgtcgaacgggctctgcggacattttccttcatgatctcgtcgagtacggcctcgacctaagtgtcaagaatgcccagccgttagcgtctcaccatcagggtgagtggcgttctggtgcgaccgacctcctccgaggccgagatataggccgcccggccgacaaagacgctgccccggtcgagcaccggctcgctgaccgagatcgtccggccggtcagcgctaagggtagcgagctcgcaaaggacctcagcccagtagtggcaggatagaggccgttccgcctcgcagcttggagcataggcaggcgagagatggaagtcgtcgggtcgagcgcgttcggctcgagccgaacctcgtctctccgaagctctcctcaacaccgaccctttcagccggaccctacttggcaccctttcaggccactcattcagagctccatcgtctgcatcggattggtaagtcaacacgcctttcgtctgccagttcctgctgacgctgatatctgtcccagcagcacgaaagatgccgtccagacagcaaacggcgcaggaggagcgtggttggttctactatgctcggatggctgggctcatctacctcggctccaacatcgcccagacggtagtcaaccagattgtcggccccaaggtggccgctccggccccaaccgctgtctatgactcgtcgctccctgcagccgtcacgcccgacagcgcgtcgcctgagctcgacgcctacagtcgggtcaaggggccgcagggtgtcgccgtgccgatgtggcccgagggcgcagcgctcgacatgtgcgtgtaactggaagtcttccttgccgacagtcttgctgactcgctttgactctgcgctcaggtacctctacttctcgacctcggacgacggcgctgtcgacttccgtgcggagcctgccgtcctctggcgcaacctcgactatcgaccgagtgccaagtttgacctgatcaaggatctcgagctcgagatccccgaggtgcggctcgactgccaccgcggcgccgtgccttgtagacgcaaccctgactgactgcttgctctctgtcgtgcctggcatcgcagagcgtccgatcgcacaacggcagctactgggccgatgtctttctcacgaatggccgtacctcgccgaacccggccgatgcgtcctacaacggcgccaacgtctaccacctgcgcaagcgtgcgtgcactcgaccgaacgaaggctgctggccatttgcctaacgctgaacctcactctctggctcaccttgccagtcctcacgcgcttccataagaagaagattatccggaaggaggtcaacctgctcagcggcggcaaggacgagacggccgtcgaggagaagacgactgcggccgagctcgagcaggagcgcaaggacacgccgatcgtcgctcactggcatcagaacctcacgctcgccctcttgacgcaacggcctgagatcaacctaggcgctactccagccgaggtccgcgagtgtacgttcgagcttggagctcgttgtgcgggcggcttctgacgcttcgagtgtctgcttccgcagtcatctcgatggagcccagcggccgcaagtcgtttgacggcaagagcttccactaccccatcctctacccgaacgagtgcgtgatcctctgtaaccgtcgaagtttctctgtcgtccttgcgctgactgcgcctctttgcccgcagcttctggaacctccggagccagtacgtcgagatcaacgagacgacgacgacgctgcccatccggatcgagcttcacgacattagtctgtccctaacatcgctgtgccggctcctccttggccgagagctaaccatttttcccctcggcgcggtttccagcgcactggaaattccagctctacgcctcggccggcgctagtctcgagaagcaggcaatcgctgccggtggaaacggcggcgagatggacgagctcaagcgcacgttgattgaggtgagtccggcaacgctgcttcgtcgtcatcgtccgcctcgccagatgctgactcctctgcccgccagacaaacccgtggctgctcggcacgacggtcatcgtctcgattttacacatgctcttcgagttcctggccttctcctcggtaagccctcactttgctgctgtcaaagcgacattctgtcatttctgacgctcgtcgcgcttggcctttcaggacgtcggccactggcggaagaagaacggcgacctgacgggcgtctcgatccggacgatcctcaccaacgtcgtcgtccagctcatcatcatgctctacctgctcgagagctcggacgagacgtcgtacatgatcctgatgggccagggcgtcggcctcgcgatcgagtgctggaagatcaccaagctcggcgacttcaagataacgccagccgggcccggggcactcatcccttaccgcatctcgttcgaggacaagaaggtgctctcggcgagcgagaagctcacgcaggagtacgacgcactcgccttccggctcgtctcctacgccgccggtccggtcctcgtcggttacgccatctattcacttgtctagtgagtcgccgacctaaccttcgggatcgtaccactgatttcaattgctaaacgctgctcaacctgggctacgcagcgcgactcaccggtcttggtactcgtatgtgatcacgacactcgcccaggtaagccgtgatgacatcgccatcgctctgcatcgacactcatcttcatgctgctcatcccctttcaaggccacctatatgttcggcttcgtctctcttgtcccggccctgattatcaagtacgtcttcactctttatcgtctgaaggttgacctgacgctgacctttgcccctgagcccgcagctacaagctcaagtcggcaagtagactttcctcgacctgcgaatgacacgctggacccgagacactgatgacgactgccctgcctgactcctgtctgcaggtcgcccacatgccgatgaaggccatggtttacaagacgctgtcggtaagtcaaggctgtggtctgctgcgcttgccgcccttgcgcgcgcgcatccagtcgctcatccctgaccgccttaaatgttgcactcgaacagacggtcgtagacgacttctttgcctttgtcatcaagcagccatggctgcaccgtcttgcgtgcttccgcgacgacgctgtcttccttgtcctgctctaccagcggtgagagcatctctactctgccgaactctcacatatagccagctgacgatctcgctgtgcctcgtacgcagctggatataccgcgtcgacaagaatcgcgtcaacgagtacggccagggcttcgtcgaccctgcacttctcgccgccagcgagggcgtcgacggcgagccggccggcgtcctggccgcatccgccgtcgtcgacgagaacgagtccaagaaggacaagtagaagggaggcagaagccgtcggagccgcaccagatctcctttgcatcatgcgaatcatctcattcatccttgaaaaagcccgcgagccaggctgcttccttctccatctcggccgggccccgcgcgatccggtcctcgtccgcgtccatcttgagcttctcgccctggggtctacgctgaggcttggttgcctcttcagctgcgagcttgtcggccagcgcatgctcaccctcctcgagggcgtcatagacgcggtcgttgacgccgtcaaagtcggtcagctggcggggaaggacatggacgtgcacgtgcgggaccgactggccggcggcgggcccatctctgaggagggtcgacatacgtcagtcggaatcactacatcaagagaggcgccgactgactggcaagagacggtgcagctctggccgccgtaggcttcttcgacgacggctgccacgcgctggacggcgagaaagaggtcggcaacctcgtccggccgcaaggcagatagccgggggacaacccgtttcgggcagatgagcacgtctgagggcatacagtcagcgcgtcggtcatgtcagaacggggcttttgctagcagaggagagctgggcgagctgcgctcacggccggggacgatgggtttgaggttgacgagcgcaaaggagaggggtgtcctgtagaaggcttgcgacgagacctgcagcgtagaggtatcgcggaatagcgtcagtcagctgaccatttgaccccgaccctgctcgagtgcactcacgcgaaacgtcgagaacaggagctcggatgagggcggcatctcggcttcggcggtcatgcggagggcagaaggctgccgaagcggaccttacgttaagtcagcccaaagcggaagcgcaggcgggagctgctttccgactaacatgcgtgcaagagtccctatactgtcggtcggcctgctgggtgtcggtgcgaggtcaagggcgaggccgctttggcggcgaagagtcggcggctgagcccctgtcatgcgcagcagtcttcggcccgctctcgatcgcctcgctcccagcctataaggagcgaaggtctgcagcctggagatgggccctcttccccatcacccccatctctcctgacctactctttcaagctaaccttctcaacagcgtaagtcgtgtttgaccggcatcgaagcgagccgtcgcgcgtcggcgtccctccgacgtcatccgcgcgtgggtgggctgaaggccctcgtcgttgcatctccccccggaagcaggcgagatcgagacggctaaccttcctttcctcttgcagaccatggacgctctcaagaacattggatccaagctcggcggcggcggccaaggcacgaccggcacgactggcacaaccggtgctggcggaggtgtaagttcttgcactttggatgcgtcatagcagcgcgcctgcggctgacgtcctctgcttgtggcctcaggacgctctcgacaagggagtccacactctcaccggccgcgccggtcaccagaccaacgccggcacgaccgagaagattagcgatggcattaggactggtttcaacaaggtcagtgttgctcggcacggagctcggttcgagcagtacgtccaggacaaggctgacgtccgccgttcctcaggccaccggcaaggacatccccgtcaaggaccagcagtaccagtaatctactcgctcgtcctacccggtcggcgggcgtttgaagcctctgctgccggcagttccagtcgtgtgtagcgctagtctcctctctcctgtgcttcccgcccgtgatcaacatgtcttcatactcgcttgcttctgacggatgcaagggcctacttctactgaagctcacgctgcacgctcggccaccaaagagggcgactgccattcttcagagtacgatcgacaagcccttgtaccaagtgaagcccccgacggcggccaagcctccgacagcggggctgagctcgagctgggtgatggcgaggatccagagggtactgagcggcggagccttgcacccagtggggcggaggacagtcagtcgccgacgatcgcgagtagacacaagggacgcacctgctggatcacgaccagccagccggccttgttgaggacccagatcagcctcgagccagcgaggcagcagaggccaaagaggaggcactgcgtgagtcgaaggttggcgtagcggttggctgcagcgaagcatcagccgtcagcatgaagagctgagaagcagaaacgggcgtgcttgccgcacagtagaagacaaggagggagagcgctggagaggcaaggccagtcagcaagtagccaaggaggctgcgagtgcccttctgagaaacaactcacccgggatggccgtcgctaagcgccctgcctcgtccttgacgccaggatgccggccgtactgctggtggatgaggctgaaggggcggacgaggggtcagcttgcccagccgaccgcgcagcagtcgtccgcgccgcaacggcgacgacgccggctgacccacatgtccatgagcaggtagcagaagctaaaaggaatgacctggagagcgcatgtccattagcgatcgagaacccgacagcgccgcatgagtcggacagaccaggatcgccgccttgaagatttcgtcggcgccttcctcctcctcctgccgacaagcggccgccctcacgtcgtcggcgctcatgaagaccgtctcgggtatagcgtcgacgagcttcggcccggggacttcaagcacctcggacggcgggagcgagccgagggcttcgcgggcgagaaaggtctgctcctcctcggtcaggttgaggtcgaccgggtcgaggtcgggcgagctgccaccgtcgctgcggctgctgccggcgtcatcgaccgtggcagcagcgctagctctgggcgtagaggacctggccgccggtcgattctctgtgatgcgggccatgagaagggtcgcaagggctgctgggctgctgtcgaggtgggcgtcgtcggttcggagggacggagccgacggcagccgaccgcacgacatcccggccggccatgagcaccgtgtcgacggcgacgtcccgacttactcgtcgttgcctcctgaccgccacttcttgactcgaccgatcgacaggaagctcgcaaggacttttctcgcccagccttgaccgacctcgttcaggcgccttcctagcgagagcccactctgctgcccgccctcggcgcccaagagtcggagctcgccgcaaccgtcagccgacatggtcaagccgccgccgtcaccaccagaatcgacaaatcgggatgaagatgaccggctcaggggcctcgtacgtcacccgctttcgcttcggtcgctcaaactggagtgtacagcctgtcggtgtgggctgacgagagctcatccccctgctgcggattccgactcagtcgtcccggctgatgagcttctcaccctcatggttcagtgtcacgatgggttcgtcctgggagccaaagattcgggatcagaccagagtagactaattcggcctgctgttcctgtggcggcaggcactggcatcccctgcaccctcatcttttcgtcgccctacccggccgtcgtcgagcgcctcaagcccgtctcgacggccatcggcgtgctcaacaccgtcctcttctgcgcctttactgccgcctttgtcgtgcgctacatccgctggccgcacatcgtcaaattgacgctcggccacccgcttcaagtgcgtccggcccggtcagccgtttggccgcaaacgagcctcttgactgactcttcacttgtcccttgcgcagtcactcttcctcggaacctggcccatgagctcgttgacgtgcatctcaggcatcatctccatctcgcagggttacgggctgggggagtcgtggatttgggccatgtcgtactcatggtggatcaccgtgcgtccaaggcgagcgcatcgccgaacgacgctaacacttgaattgccatctttccatacgtcgcaggtcgcgatcagcgctctgcttgccttcacagtcccctttacatccttgtgcgtcgtcgttgtcgctctttgtgggagcagggatcttttgctgacggcgccgtgtccctccttcctttcagcacgacgcaccgcaacgtgccggaaggcatcacggcctcccttcttctcccagtcgtgcctctcatcacctgtaagtagcgctgcacctgaccttctgctggtccgaacgagcagcttcctgaatggcagcgaatcccgccctaaaggtgcggccattggcgccgttcttgccgagcacttcgtcctcatcgactcggcctacagcatgcacatgtggatctgctgtgcgtctctcctctggagttcaagtcgatcaggcgtcgctgacgcgaaaaaaaaaccctcagcctacgctgtcctcggcgtcggaattctcgtcgccctgatgatcctcgtcctctaccttcagcgactcatctttcatcacattccgccgagtacaaccttcgtcacgtctgtgccttgtagagtggctggctgaagcttggtcctatctgacgtcgctcggcttcagacgagaccatcatctcgagcttcctccctcttgggccctgtgagtcgattggcattgagcagccgacgctaagcagacctctgacccctctaactcctgcgatctcaaaggtggccttgctggctgtacgtcgtcagattcacatgagacgcaagcagcggctgacttctgctttgtatttgtccagtttcaatcctgaagctcggcgccgtcgccatccacctcttcccgctgatggcagacggcagctcagatgaaggcatccgcgcgggcaaggagatggccggctgggccctctggggcgttggcgtcggtacaggtgagcgctgcctatgcacgttccgcgttcgcactagctcattcctaacctcacgctctgcttctgcagcgatcctcctttggggccttggggtacgtaggatcctcgccctcgcccgcctctgaacctcccgtgctgatgggatcatcccaccactacagatctggttcatgttcgtcgcttgcggcagcctttgggtccgctggcgcgaggagaacttgcctttcaatgtgcgttctgacgacagccatcacgctccatccgtcagctgaccccctccaatcgcatgcctcttcgaccagatgggctggtgggcgctcgtcttcccgctggcgtcgatgacgctgtcgaccctgctcattggcaaggagctcaacagcgccgcgttcaacgtcatgggctcggccttcacgctcgctgtgacgctcctttgggtgcgtgcacctctgcccctcttgtcgcgtcgtgctcgattgacgcagatcatcgtcacgaacagctcgccgtatcggtcccgaccatccgcggtgcgctcgctggcgatcgtcgcgtctttgctgcgccctgcctcgcccagctgagggccaatcaggacccagtgacgccaaacccatctctcgccgactcggggggccggcgagctggagcagcagagcgcggcgaggagatgatggaagccgaggcatacacgcgtgaggtccggcaaacgggcgccagcttatctcccgagaaggatgtgagcgaagcgctcgaccgtttgaaatgagatgcggctccaagtcaagatcatcgcagcgagcgacccgtcatcctcgaaacctgctgccatggcgagacacggctccttcttaaggtcgcatgcagattcaactgctcggtccggcggccgcgtcctcctctgcctgccacttggcatacgacgcgttggccttgacctgggcctcgaacgccttcgcaagcttcttggcctgggccttgctgaggtcgacgccctcggcgtccttggtcggcacgccagcatcgtcccaggcagtgtacgtgccctcgggcacattaggcggccggaaaaaatcggccgctggcaccttggccttggccatcttgtcgagcaacgcacggcgagcggcctcctttttggcgccggcctcggcctgcttctgggcggcgagcgcaatcttggcctcacgggcctcgaccagcgtgtcagctgggacgagcttgacgagcgcccggccatcggcctggtcatcaagcgcgacgccaagctcggccatctcgtagtcgcgcaaccggtccgtcaacgcgagaatttcctgcgagtcggccttggcgatcgccagccggcgaatctcgtcccggaaggatgatagcgcccggaggtagggcatcagcagcgtttcgctctgtggtagaagtaaacaaatggcttttgtcagaacgtctgtaggttcgagcgggatcccagagacaactcacgtcggcaccggcgccagcctcttccttgctgccccagccgagctccgtcttcggaccctcgccgaggcccagcatccggagcattcgtccgatccattcggccgcggccgtcggggcgcccaggttcgaccggttcaggcgaaggaacgagctggccttgcccgtcaggtcggccaggacctggacggcggtcggcgtatcgaacgagtcgcagagcgctgcacggaaagcagcctgtgcggccttgatgctatggccggccaaaaccggtcagcatgccaggagcgccaaaagctcaatcgataagaaggggcacgtactcagccgtcagctgcttctcctcctcgtcgtagtggtgcttgccgtcaaagacctcctcgctggcctcggcttgcgagatgcgggccttcatgatcgtgaagaagttctggcagagggagtgggaggctgctcgcatcagcggcacacgggcgaaaggcgtcgcagacgtaaggaaggacggacgttgaaggtgctctcgatgctgcggacctggtcgagcgcggcgtgcttgaagtccatctttgcgttccagacggtcatgatgaaggcgagccggagctggcgggcagagttgcgctcgagcgcctcgccgatcgtgatgaagttcttgagcgacttggacatcttaaggccctcgatatggaggtggccggtgtggaaaaagtagttgacccactgctggcagccgtggaaggcctccgactgggcaatctcgttgtcgtggtgagggaactggaggtcaacgccaccagagtggatgtccatgccctcgccgaggacctcggtcgccatgaccgagcactcgatgtgccatccaggccggcccgcgccccacggcgacggccacgagggttcgcccggcttggaccccttccagagcgcaaagtcggacggggagcgcttggcaaactgcgagccgagcgagcctgaagcggtcggacaaaaacgtcaattgctgatcaaaacgatgaggagaaagctcgcggcagacgaaccctcgccttcctcgagcagacgcgtgttgcctttgctccagggcgcgagcttggcgtaagtgtgctcccaggcttggccctcgctcttgtgaccgtcaaaggccttgacgtcgaaccagacgccgccctcgccgtccgagtaggcaaagccgcgctcgacgacgcgctcgacaaagctgacaatctcgggcacgtactcggacacgcgtgtgagggtcgacggcggcaggacgttgagcgccgacatgtcggccatgaaggccttctcccaccgggccgcgagcgcacgtgagatggagggcgacgtcaccgtggccccaaactgccattcaagagaggaaggacaatgtcaatcgcaaatgcgtggcatgcggcaaaggacggctgtcgcacctgcttgtcgagccagaggccgagcggatcggcgacggcgtcgatgagggcgtcggcgcgcgccttgtcggtgacgccctgcgcaacctcggtctcggcaaccttgatggcctgacgtcccgaagcctgttgcggtaggactcggtcagcgcttggttcagcagggtcgcacgcctaagtatgacacgcaccaggaccttccagtacatgctcatcttctcctccttggcctcgagcgcggcccgccaggcagggtcggtcgtccagcgcggttcgagttcggcgtcccaagcgcgctcctcggagccatcgtcctccggcagctcaccggcagcgaggtccttgccgacgttctttcggaggaaagccgcccagctctcgcgcgccttgctgacgagcgtgctgtcgagcgtcgccgtctcggctcggagtgcgtcgcgcaagtgatcctggcgcgagcggaggatgatcttgtcatcgatgtcggtcacattcatgacgaaatggacatcgtagttaaagtagtcctggaggatgcgtcggaggacatcctgcgtcacgtagttgctgcgagggtgagggcggcggcaggtggggcggcagcggcggagtgaggaggcgagggaggcagcggtgcaggtgaggtgcggtcagctcttgctcaggatgagagccagagggtcgagagacgtaccgggcgtgacccatgtgagaagcgtcgtagacggtcggcccgcagttgtaccaggtcacctggcggccgtctttgggcacgaattcgacctgcggacgagcggagagaacagggtagagcgaggcgtcgaggcgggtgcgtggagagaagcgcgttgaggcgggtgagaagccaagccgacttggttgtcagccgagctcttccgttcaggctgcgagcggcaggcatcgaaggcgttcgggatccagcagagctgaggcagaaggggctgcctcggaggcgtgagacgacggacctttgatcgagtgagcgagttccagaccttgagcttcggcgcctgagtactcggctcgggcgcggcccacgcaggctgcttgaccttggagggctgctcgaaggcgggaggagtcgaagacattgggcgctgctgcaggagctgttgcgggcgaggggcggaggcaaagagggcgactgaaggagcttgggctgcagggcgggcgaggagcaggcgggaggcgttcgaccgaagtagggcagggcgcatccactcgtgagtgttcgtagaagggggacgagcgtgcgatgctgacggtcggaggcgagggagcgggagcgcgtaggtgtgaagcaggcgtgggtcaaaccggccaggcgccgcgcgattattgtggaccgagtgcctcctctgccttcagcgcccgataaagtggccatcaagctacacgaggctgcgtgagagaaaccataaaaaagcttaggttctgagcttcagccccgtcattttcttgagttttcaagttatgctgatggcccgtcatgagctccctaatcgacaggtccagacgccctccggcggagggcgctgggcaaatgcctagaaagccttgcttttggccctcaccgaattcgcgctcatccgcattgattgaggcgtccagaatcctgttgtagagaaaagatcttcagttctctaacggtactgtttacccgctctcacgatgctcgtggccagcttatacgccatcgattgaaggagggccattggtccatgacaatcacgccgcgcctggcagctgccagccacgcttcggaggggcgcgagtcttgggctgaggcgagggcggccgcggccgccgggcctcaaaaccttatatataatatttgtatggctcgtatcaataaatccgtccggatggtgtagtggtatcacgcggtctttgggtggccgaggtctccggttcaatcccggattcggaccgacatttttcttcttttttttttcaacaccattctttgaccctcaggaggagggagggactgaagggggatgagcccaggtctctggattgctactgtgccggtcagtggcggcccttgtgctcccctgtccgagtttcgggacaatcatgatcgtacctatcgcccacggaccgtaggctcactcccctttcatttcatcgcttgcttctccgcatcctgcctccctggagtttcatggttgactcattgagcccctttagcaaaagaagtcgatggacgggcgcccgccattgattggggaggagcaccgacgcgattaaggggcataaggaagcttaccaccgacgcaaagagtcgagaagacagacgttcagttcatcctgttttcgcccaacctagctctcaatctcgagacctccttgagttgatttgagtagaggtcgaaacttgacccttgctatatcgccaggaaagcagctgcccggctagctcaattggctagagcgtctgacttttacaatgacttgatcatagttaatcaggaggttgcgggttcgacccccgcgctgggcttacttttctcggagttgagtgtaattcggcatcaatcttgagcaaccttttcctttttgcgccgagcctcaataatcaaatgcaagcaggcggaacagagacaggacggtgactgacaagtaaagtgcagatgagggcaaagactttgataggcgagagcggcgcaagtcgcgcaggagagccaaggcaaggcgagcgcgtccttccgtcgaaggcctgctgagcgctgcccgtcgcgaccccttgctaggcacacgctccggcgatctgaccacgagaggtgtcgaaacagcttcaaggctcaagacgcggtgatgaagggcgcagaacatgtgctcggcacaaggtaggatcgcagtggctggctgggccgttttgagacgacgccggtggacacacatgtcgcgctcggccctagccaagttgcagtcacggtcgcacttgcgcggccgctcatcgcattggaccagctggattgattatcgcaaggagcgagtgacgagtggatcagcgacggccgcgggcgagggaacggcgggaagcagactggagctcgaggacgcacccggcaggcgcccgcgcgaagagagcaagttcaaggctctgtccgacgccgagatgtcaggcaagagctggccctgtgagaaggcggctagtcagcatgcgaggcgggtggaaggcggacgtaggctggacacaccgatgaccgaggtcacagtctccgcgggcaagcggtgagtcgcttcggtcggtgccgccaacgagtgcgacggcagggggtagtcgacgaatgcagagggtctctcgaacgaggatgaagccttgccattgctgagcctacagcgggtcgacacgagacgaggataaggggaggagaaatgagtttgagggaagagggccaggcatgcaacaggacgcgacgcacccgatcacaccggccgtggaccgggcgtgctcgcatgcccgagagcaatgcccggcgagcggtgatgcctttcaggggcaacggcgaggcaggatggggcagtctaggacgcgaatgcgacggctgcgcgctgggcaaggcgccgatcaaggggtctgctagaacatgcaagaccggcggatcagcagcaggcgtgacaaagagcgagagcaagaccgagcgtaccgagagctgcgtcaaggaggccgttggccgtctgcaggcgatgtaaagcgtttgaaccgacgggtcctgtcgcgggctcggtcggctgagaaggcgacgccgtcaaggcgagcagggcgaggagctcgtcagctagctggacgcgcccggatagagtcctctcgtgcagacgtactcgttgccgcggtccactgctcggccatgttgaggtggtgagacctggtgcgaggtcgacgccggctggttaaggcggcggcgatggctgcggcggcgcgcagcgtttctgcagggcgacgacccgatttggcctacgtttgtcttccagcccgcggcccggcgagcggcttgacgagctaggtgagagaggtcatgatggccgcgagagctgcgagatgtgatggtccgaaggatgaggtgctgggtggcctctgcgacagcggcacggccgtcgattggctgcggcccgcgcgaggcggctcttctcgggcgaccgaccgagcgaccggccgcctcctcagcccgtgcccctctcctcctcgaccaccacctcgccttctcgccatgaactcgcttatcaccaagcccgtcctccggtcgtctcgcctgctggtcgcctcgcagcgagcctttgtcactggtgcgctccagcgcccgcgccgtgtcctgcctcctgtcgccggctgctgaccttgggctgctcgctctctccgccccctgcaggcgcccccaagaaggccgcggtcgacgtaaacacctacgtgcctggtggacgtgcgtccctcctcttgcaatcccggtggcggccaaaacgggagctcgcccggcgatcgatccgttgctgaccctcctccctcacctgcttacccccgccggcagccgtctacccggggaccgtcaacgacgcgacgaccttcccggagcccaacaaggcccatggctccaaccactggcagtttgagcgcctggtctcggccgcgctcgtccccctgacgtgggtcgcccgtcaccgattggcatgacccgcctccccagtcgctgatcccctgcatacacacacaccctcaacctagcatctcgaccttcgccgtctcatccaacgcccaccctatcctcgacgccctccttgccggctcgctcatcgtccacacgcacattggcttcgacgcctgcatcatcgactacgtgcacacgcgcaagtttccgctcgccggcaaggttgccaactggggcttgagggcggcgacgctcgccgcgctctggggcgcgtatgagttcaacacgaacgacgtcggtgagttttgcggcggctgcgagggtggctgggcgcgatagtgcgaccgcctaggctgagactgatatcttctgccctttcccctcctccttgcaggcctgatcgaggtcgtccggcaggtctggaccgcataagttgcattcgagccgtgggaaggaagatgtgactcctgcggtgcctggtccgcagggagagggggaggggatattccgatgcgttctttctgcttcctctcgcgagcgcacgtcgggcgggctcgcgtcctcactcgtcctccttctcccccttctcctcctcttctgccaattcgatcgccttgatcgctagggcgacgtcgatagccttcgtctgcgagtagagttgaagtcaggttcatccggaggaaccaggcgctcgcccgggaggacggcggggtgagcgaacagcattggtggttgcctcgcagactcgagagggttcaagttcggttcgcaggctactctccgagtttcgagcagcgagatgacagcatggagggtgttgtaggtcgctcgtctcaagcaggatgtgctggatgggtgactggtcggctggcgagtcgttcttcgctagaggaactagcggagaggaagcgatagaggacgagcgcgagcgcgaggacggcgatggcttcggagtgggcatgttgtgcctgacggccgtcttgctcctcgtttcgcgcgggcatggcctcgcacgcaacaagcgtgcgcccgtgactgcaacaaagaagggtcatcgtcccttcagagctcgggttttgaccggccctcccgcccgccaccactgccgtcctcgaccggcttcgcacccctcccctcgccgccggccgtcgcaccctgctcgcccgtcaggcacggtcccggcggcgccgtgcgcgggtcgatcggcgcgaggcggacgcggccgactcgcatgtatttcttgctcgactggaaaaaggcgtgccagtgctcgaggcccttcgcaagcgaaggaatgcaccttgtcagcctcacgtgcacagagacggcgggcgtgtatctgcggtcgcgactgaccttgagctcgtcggccgacagcccacggaggtcgtgcgtcaggtgatgcggctggaagcagcccgtcacaaaggcccggctcgcgtccttgccagcgctgctcgttgcgagccgtgcagaagccgtcgtgagcgctgagctctgggcaaagggagacggaggacgtacagcgtgtggtacgacccgcccgggccgtagatacgacccgagacgctgacgtcgtagacgtcgcccgcgacggcgacatagatcggccgggaagggtcgcggccgtcgtagcggctcagctggtgcgcgttaagctcgatcagcttgggctggggcgtaggcgacgacgtcaggcgtgtcgcggtcagcccttccgtcctgcgtgcgagaaacgaccgcgggagggacgcacgcgaacgacatagtcgcggaacgcccgccggagctcgggctcgtagccccagacgggactgtcggtgacaaacttgccgagcacgcagccgagcatgagaagccagacgagcgtcttaacgacgtcggccgccgaccaaccgctgctgggctcgctcgacggctccttgccggcggaagaggaggcggccgcgccctcgttggcggcggcggcggcggcggcgcgggcggccttccaggcctggtgcttcaagtacggcctgtttgccggcttgtcctcgacgagcttgcccgtcagcgggtcacggaccttgtcgtagcgcggtccggccgccgtcgggatggcggagcctgcggtgcagtgcggttcgggcagacgagggagggaggtcaagacgaggcgaggtcagcgccgggagagggagcgggcctggcgcaagtgggcgagcaggcgcgcgcgcagacgtagtggacggacctggtgcgtgcagaggctcgtctagtgctgggctcggtgtagggttcggtggtggcatggtcgtctggaggagcaaagaagggtgagcgatgaaggtaaggatggcggacaagctcgtcggggtcgtccgcgcagtcgccccgtcgggcgagctcccgggtcgccttctgtcgctgctctgggtcggcgagcgacatgactctgctcggcggaggccgccctagcctgttctattctgctggcttgagctctctggctctctgttgcgagaatgtccgagaaggctctttctggcgggcggccctctgtcgaagctgctcggcactcccacagcgacccgacggatgacgccgccggcctttactctctgctcctcctgcccgccgaccaccacgaccaccaccaccaccaccaccactaccatatttgcacctaccctcacacccaacgcaccagcatgaccaagtccaaggccatcggcatcgacctcggcacgacctactcgtgcgtcggcgtctggcaggtccgtccccctctctctaccggcccagctccgcccgacccacctcccatctcgtccatctcgcccatctctccctcttgctagcgtcgcatcgcaacatgctgacgccttgtcctcgctcccatcgcccgcagaatgaccgcgttgagatcatcgccaacgaccagggtgcatcgccttctcatcctcccctctcgacccctttcttttcggccgagggtccatgctgactcgcctaccccttgccaccgaccgactggcactcgatgctaggcaaccgtacgacgccgtcctacgttgccttctccgacaccgagcgcctgattggtgacgccgccaagaaccagacggtgtgttcttttcccccttattcctccccctttccgcttcgagtgttgccttgctgatctcgagtgccgctcttgcccgcaggcgatgaacccgcacaacacggtctttgacgttggccccttccaatcttgcgcccgccttgctatccctaggtctgaccccccctgaccccccccgactgacaactcttctttccttgacagccctcctcccaccgacgtccctccttccgatcctcacctcgctcgttcagcgccacccggccctcaagcccgacctgctcgccctcctcccgcaaccgtcgctcgccgtcgcgctcgacgcgctccgcgcggctgaggcgcgtgtccggtcagccgtaccgttcgggtgggacgcgcagcggcctgggggaggtgtgagcgagcactatgtcgtcggaagggtccaggagagcgtgggagagctggcgtcgctcgtacgtcgtcctcctgcagccgtctcgctcggccatggagttctgccgctgactactccttcctcctatccgcgccgcaggtccagtcgcacctgcccatcttcctccctctctccgcggcctctgttccctcctcttcaaccccgcggccccctcctcacccgaccgaccagttctcctacctccaacagacgaccggcctcctcgtccggctcgcgacctcgcttccgcccctcgccgccgtagacatcctctgggcgcggctcgcgcgcgagtgggtccgctgggcagagacggtcgcgcggtgggtcaacgccgagggcgggatggtcggcgctggcgttgcggacggctgggtgcgcgagctcgatcttctggctgccgacagcgggagcgcatcggcaacccccggcggctctgctccgaaagtgacgaacagcagcgtcggcggcggcggtagtgcggccaagattcgggccgaaatcggcctcgtccgcgacaagtgggtgcgcgactgcggctggctcgttggtcggcggctgcaggcccagccggtcgacgtcggcatggacgaggaggaactctagagttttccaccccttgtgcttcttcaccgaccttctacggaccacgcctcgcatctagacgcttcattcggccccaagccccggccgcccacacgcacacaccttcatgatcatctactctcttctatcgcacccacgtctccgaccgttcgcactcttccccacggctccgcctcttagctagatctcctctcgctgcaccctttcgtaccctcgcctgctgtcaccctcccctcttctgcacccttccgcccccttccccttagcgcttacctttcagcgcctcctcccgttacacgatcacatgcccccacttcacgacgccacaagcgctgcttgctccgagcgaaaagttggggagaagagaccatgatctactgagatatagctggcgtcaaaagggagcgagatgcagggcgagaggtgagagaagcgacgcgtctaaagtctacaggtacaagagcgagcgagccgcagcgagagggtgcccgcctatcaggcgccgagtagctttccgccaagactccagtcctcgagctcgtcctcgccgcctgcgagcccccggagctctgggctcgagatggcgagcagcagctcggccgcgcggagctcgtccttcccgccctgagcgagggctggatgctgctctccctggcgatggtgccggtgctcggccggtgggtgggcgacgaggtggtagtcgacccgtgcgccgggcaggctggcgaaggacgagaaggacgagtgggctcggccgaggcgcggctgagtcggcggcagcggcggcgagacggaagggtgaccggtgcttgccgacccgggcatgttggacgtcggcggaagcatcgacgagatggatggcaggcgctggaagccgatcggaacgaaggccggcgcgctctgccggtgatagggcccggcaggcgagccgtagagctgtgcctgattcggcagcgacgccgatgccggagccggaagcgggaccgaaggaggaggagagagcgagacctgctcgccagcagcgtcgtcgactgacatgtcgctcgcgccaggcgagaggccgccttcgtccgactcggtctcgatcccctgccacgggctctggtcgcccctcgtcgacgagcgcacacggaccgccgtgccggacgagatggactgctgggcgatctcgagccgctggatcttacgctggagctccttgacgtattcgactgtgctggttcgtcgagaggttgcggtcgatgtcaggtagggcgtgcgaaggccagatggtcggcgcagtgcaggcgacttaccggacaagagtaccgagcttgaactcgcccttgctgtcaccttcgccgctgccgtcactgctctcggccgggacgaggtcgcgcagctcgacgaggcagctgttgatcttctctctccgacgcttctcctgtggcgtgcgggacatggcgagtcagaagacgtgcgcagcttcagcaagcgcggcgtggggagagacgcacgatgatcgagtggttgatcttgcgctgcgactttgcgctcgctgccttgctcttggatttggccggcgccggaagagccgatgtcggcgggagcgaggcggtcgggagaagcagcggcgacggatgcgactcggccgacgtcgcgaagtagctcggcgaggggtcaggcgtcagcagcgcagtctggccaggacgctgtgccgaaagcaggaacggcagtggtcagcccgcggccaaagccaggcggtctgtcgagcagacaggtagatgcgagggcggacgcacgccgtagttaaacgaggccggccgtttggcagccgaggagctcatggcgcgagagggcgagagagggcgggatgtgaggaggagcaaggcaggcagcttctgcagccggaggggggagagggaggtcggtgtcgggagggcaagcgagcacgagccggcagacgacctgctcgcacgaccgagcagaggtcgggagagttcgagccaccagtagtagcagaaggatctcaacgtgcgcggccagtctgggcaccgtgcgtggcgagtctgcggccgggaggagcctcctccgctcgttccagcaagccgacgacagtctgccataaggacttcggtcaggatcagcagcagcgggcctgcgtagcggtggcagaggtcgggaagcggtcgagcagggaggatggagaggagagagccagaggcgacggccggcgcacaacggcgcagcgcgcactcggaagcgtcgacgcagacagcgcatgcccgctcgccaagttttgacagggcccgccttcttgcaacgcgagcagagcgtgagaggtcattagatggcaaaataagtgctgaagcggcgatctgcgtgggtgatccatgagggcgagcggtcggccacagactcgcctcaggcggccaagggggtcgcatcgaatgcggtgctgatccgccgcatcgagaggatgagcacctcgatctcagcctcgatgccggtcgcgagggcctcgttgccggcttcgcgctggtagcgggcctcgcggacgagcagtggcgcgacaaattgccagacgatctggcgagggcgggcaagcgggtcaggagcagctcgtcaagtaaagttagaaggaggaacgcaccgccatccagatatcaaggcggccaaagtcgacgtcggcaattgttcggactgcgaaggaaagacggcgagacgtcagcaaaggaattcgaggggactcggccggcaggcgcgagcgacgcactgagctggacgatcgacctcgaagcaacgacgcatttcggccagtaggtcgcatggtcgtagcgcgcgtgctcctcgtgtagaagcgcaaagctcaagaggatctgcgactggagcaggacgagcagcgagcggacgaggcccgactttggtggggcgatcaggccgttgtcgtcgaccgcgagcgcgattgactcctgatcgataaaggcggtcggcaacgttcggacgaagcggttgaggacgtgctcgagcttgatgacctcaggcgggacaggccctgtgcgaggggctggcgcgcacatcgtctcggacgtgtcgaccgtttcgggcgagtggtcggaggacgccatcgcgtcgaccgcggccatcgggaccggaggtccggccaagtaggctgcacgacgagagggcactgatatatcgtccgagagcctcgagatccgtccaaggatcaggagaatcttggcgattgcagcgccaatgtttctgtcgaggaggggagtaaggggtaagtcagtcttgtcttgggcagcttacaagtcggcaggcgacagggtttacggtgccgccgacgaagcttcgagtatccgcaggtcaacctcgtccgcaaataggtcggcgacagttgccggtcggatgccgtcgtcggagtgctgcaaagaagtgtgaagaagaagcggtcagacgggaggagggacagagcgatgacacagcgacactgatgcagtgcggacctggttctgcgcccagaggaagacaacccggccaaacggcgtttctatttcgtcgtcggggatgcaggccggcaggcgtgtcgtgatggaggccaggcggtccatcactgcgtcacagggatcaggttgtcagggtgacactccctcgcgcctggagatcgaccatgctggatcactcactggtcacctgccagaaggtctgattgagacagagggaggaaagagtcagcatggctgctccagcacgggccagaatggaggtcgtgagactgacatagatccggtctgcgacctcggccatcgattgggcaggcggcagcaattgcgccggtcgcttcgagattgtaggccagcgggcctgctgctgaccatcttcagcgcggaggaagggccaagattggcgatgcagcatcgcagcgagcgcgaggcgagaggcgcagcctgagagcaggaatccttcgtggaagcgaccgctcgtgaagaggcaggcggcgagaagggccgtcccacggaggacgtcgaggatacggtcctggcggcccatgccggcgtcgatgtggcccttggcgatgcggaaaaagtcctcgccgaggctgcgagcgagcgtcgacgtatggtaacgacttgcatgcgtgtactgcagggagagagatgcgcgcgagtgagaactttgccagatgggcaacagctggctgatggacttaccatggcccaaaggagtccaggatgaggccgtgtcgcctctggcccggccagcgcggtagcaagagcctcataagagatgatgagggcggcctgccgccgccagtggaccgaggtgaccagcaactcgtcgcggacaacgtcgggcagcgactcggtcggcatgccgctcgcgacccaaccctgcagagcgaggtcaaactcgctcgggccgctcgtcggctgcgggctgatgggattcgaggtggtcgaggccggtggcgtttgaaactggagccacatgtcaaagtcgtcgccaaccggaggcgtgggttctgagacggccgacaaaggcccaggggtgccgccgtcgcccgtgacctgaaggccactgacgcccttgacaagggttgcgtcggccgtctcgccgattggagccggcatcgtcgtccactcgttctcggcagtcatccaggctggaggacccttcggctggcccagcatgaagccaccggtgccgttcgagggtcctgcgaagccggcactcgctgcggtgccaaacagccgttcaatctcgtccatgaacgcctgctggtcggcctcgcgtcggacttcgtctggccgagctttggagcgcggaacatggtgcggataggggaaggatgccgccgaggagggtcctgtgcgactgacgaggttcgaggaggaggctgaaagggtgggaccggccgacgtcgagcccatcatgctaccgctcaccgtagggaaaggcgagggcgcgaaggtcgacccggaatcggaaatctggaacgtcgaggtctgctggtccagcgacggatagccgggctggccggtgggcagaaacaccggcggcggcagaaagggtgtgggtgtcggctgcacggccggcggcgtcggtgcgacacgtctcgtcaagagacgctcgagttgctctggtattggcagcagttggcgtcgatgtcagtacagtctctatccggcgctctctggcttccgcgatggtcgagcgcacccagcttgccctcgagctcagagaccctgctgcgccccgtgagactgctgctgccggccggccgcggtgtctttgcctcgtcaaagacacactcggagttgtccttcgcgatcattcgagtgaagggcgtcaggtgaagcgctggcggccggcgacagctaagacggaggggctcaccttctggcagaggccgcagacaggccgctcgcctgtgcagcgattcttcctcagccggcagcggcggcaggcagagcctcgcttgagcggcgcttttacaggcacgctcggcctggctgttgacgggccagcctccgcttggacctcgtccgttaatgacgagaagcccgtttggatgctagaggggtccatcgtcgcgttgctcgagtcactcgcggccgagaggagagcgtgcggctcgctgctgcgggaaggacggcagccaggccggaggacgagcgacgtgtgctggagaaggcgagctgatcgggctgctggggtccgtcgcgacgagcgagcgagcaaagatagacgtagaggataggaaagtcggtcgtggttcggtcggaacacggcatgccgctgaccgacgacgacggctctcgggcgaagccggccggggcgtgctgcgcctgcagcggttcgacctcgtggtacgaccgaagggctgttgctgctattgcacctcaggcacctatacgagggtagggctgcgatcttgctcatggaggtgtctctcgcttttgatcgttgctagtgcagaagtgatccttgttcgtcctctcttcaatcactctctccctgcagaccagaacgtcctcttgcaggtccctcaagatctaacaacgccccaactctgttgcctgctgctccagggactccggatagatcgagcatgcagagtgcagagctgcttcagttcctaaattccgcttcacattcgagcgatgcggatcctcccgagcggtgcaatgtgtcgagcggcgtttttgtccacttgaaggtcaacctccggagataagggaacggcgatgctgaccctgagcgcgcgggcgcttgtgtcgaaccaaagagagacgtctgctggacaagggaaagacaagtaccggtgaccgaggctggcggggttggaattcggcggctgtaagccccaacgaggaggacaacgtacaggctctcgtccatcagcatgttttcgaagaaaagctccaggaggccagtgaacaacttcttcaggtcagagaagagcccacggcggatcagcttgtccggccgctcgagccgataggggcgcgtaggtaggccagtgtgcaaaggcacattgcagaaggccggcgccgagatcagtgtcaggggaccttgcagggtcagacctccaaggttggatccctctacgtctgtcagggtaaggaaaggactgcagcgacctgtcgacggccgggtcgagagttgtcagtcgtcagcagcctgagcgacgcgctcttgccctgaatatgccgcccacgactagctgagcgcgcgcagctcgtctcatccgctgtctcctgagtgaagctcttccaggcagcgtgaaggcaacggtgcacgccgttcagacctggttcgtcgcgagcaaggtcgagggcggcgagcgtggaagggcgcagacgacccgtcgtttgtcgagtccgggcccaacaggggcccaacaggggccctacaagtgatcatcgtcaccgggaatcaagttcattgagacgtcagctgcagcaagttcggggttagcgaaaagccccgtgcctgtggtggtcttcctgtgcagaaggtgtcgtcagccagtcgttacttgtcgccgtcttctcgcgccccgcccgcgcggatgcccggcaagccgagaggacccgtagcgcctcgccaccctaccttcgaccttgtagctgctctctctccttcttggtacggctgccagctttattgacacagcattcctgccacgtccttcgctcagactcgtggtaaaaggatactttagggtcggtccatagtgagtcaaactaagccgcaggcttcactcttgttttcagcgctgggctttaacccaaagtgtgacccaaaggtttgggccgttccgccccgcagcggccaccaagcgccgaaccgagcctagcctgtcgccgcctctcttctcgacagctatcctcaagaaagacatctctgtccgtattcctggcagcacgtcgcacgcacgtctggatctgacgcccgtacccgctcccattcgaccggtctcgatcggtgcccgccttgcctctcgctcgacctccctgcccttgcccggacctgcccgcccgactactgcacgcgcactctcgctctctctcccgatcgaccttgctcggctcgacctcaatctgctcccccctcgccccgtcacctctgcttcattaactccagcaaaatggttggtccctctcatcccagatcagcagcagacgagcagcagggaccaggcactgcgctcgagcgtcgagttggatcgcttgcttgggtcgaggcagtagttgtcacgctcaggctggcggggccgttgaagctagagttgcagcgcacggcctctgctccagctcgcctgcatggaggcgtgcctgcctgtccgcaccagcgttgcgctccggcttcggagcgcacggcgatgagcaggacgggcgatctactgaaacgggctcgagctcgaggggcggggagcggctgtcggaacgcacggaggaccaccccgagctcacatgctgaccccacccctcgtgtcccctcctctgcaggctgactccaaggttgcccagaaccccatgaaggagctccgtatccagaagctcgttctgagtgcgtaatcccgcgtacctgcagtccctcatggcgcgaaatcgctggcacaagagggggcggttgctgctcgtcaagatcgacgctgactcgcgagcctcgcttcgttcgtccttctctcctcccttccccttctgcccgcggtcgtgccggtccgaacagacatctccgtcggagagtcgggtgaccgcctcactcgtgcgtccaaggtcctggagcagctcaccggccagacgcccgtcacctcgaaggcgcgctacaccgtccgcacgttcggcatccgccgtaacgagaagattgcctgccacgtcaccgtccgtggccccaaggcggaggagatcctcgagcgtggcctcaaggtcaaggagtacgagctccggaagcgcaacttctcggagaccggcaacttcggcttcggcatccaggagcacatcgacctcggcatcaagtacgacccgggaatcggtgcggccccttcgtcttgtcggtcgctgctgcatgtgcgcgagcgctcgactgacctcgtgcgctccctttgcccgctctcctctcaggcattttcggcatggacttctacgtcgtcatgggccgccccggcgcccgtgttgccatccgcaagcagcagaaggcccgcgtcggtgcccagcacaagatcaagcccaacgacaccgtcgcctggttcaagtcgcgcttcgacggcatcgtcgcccggtagatgcgtcctacctgtgtgagcgccagccggaggggacgagatgagaagacttatgatcacgatcaggggcgatgagaaagagagttgggtgctgttgggcggcaggaccttgggcttgggactgtctgctggacggggcggcaggatcttggactgagagctgctggctgtaccgtcaatcaacgcgtgacgcattgcgggtatggggcagctcaattcagacgggccagcagagtaaggcaagcggacgggcagcgagcccctttctcccggccgagccagcagcggccgtcagcgaagtcagcgcctctcgtccgtcaacaagcatcaccacctgcgagcattcttcctctccagcatcctctgaggcaggcgcgatgccagtcctccagttcgcacctttcgtatcctcgccctcgccagccttcttccatgcacttgctcggcacaagctcgacacccaacggctcgacgactcggccgtcgccatcagcgcccgcttcaccgaggctcgcctgattgtcgacaaggccgcgctggcagcgaaggatggcgagcaggcgaagctgatcggcctgccaggcgttgtcgagctcgatgccgacagcctgaccgagtcgcaagggtgcgtagcagacgaaggacaggcgagagagaggaggggggtcgctgcggagctcgccaagctgacgagggggagatgctcgctggtccgtcgtcctctcagctcgacctcgcaagcgagctctagcatagatccacaggcaatcagcctgcgaggtctgctcaagaacttcaacacgatcgaggagttcagggacgcgtccaagcccgagctcctccggccgctcgtcgacttgcttgcggcgacgctctcgcctagctcgccgaccgacgactcgtcggcacccgagctttcgcccttcctcctgctgacgtttgccgacctcaagaagttccgcttcttctactggtttgtctttcccggcgccgtgcagaagccagcttgggagattgccgagacgggctggaccgagcaggtcgaaacggaagaggagcgtgcgctgcgcgaggccatcgccagccgccggtcccagacgggcgacgacggcgagggagcctttctgctccggacctccgagtcagggaagcccatcgtcgcgcccttgcacgagttccggtctttctttgacggcctgccggaagacgaggtgcgagctgaaccgagagcgactcagaccgctgcgcgccctgcgactgaccccgccctgctatctctatcctgcagcggacggtcgtctttcacgacccttcggcgctacttgacaacccgggctggccgctccgtaacatgctttcgtatctcgctgcccgcttcgacgtccgcagcatcaaggtcgtctcgctgcgaggagggccaccgggcagcagtcggtgggcgtcggtccacgtcgccgcagcaccggagcaaggtcctttgaaggtcgtcggctgggagcgcaacgaaaagggtcagctcgggccaaagatggtcgatctgtctgcgaccatggacccgatccggtgcgtctgccgtgattctgaaagggctcgcttttcttggtcctgacaagcggcgcctcctctctaacagacttgcaagccaagccgtcgacctgaacctcaagctgatgcgatggcgcatcctgccgtcgctcgatctcgagaagatctctcgctcaaaatgcctcctgctcggcgccggcacgctcggctgctacgtctcgcgcgtcttgctggtgcgtctcggcggggaagcatcacgttttggcgtcgtacgcgaccgagcttgacagaattgacatccctccctcttcagggctggggcgtgcgcaacattacgtttgtcgactcggcccgcgtctcgttctccaaccccgtccggcagccactgttcgagtttgccgactcgctcgacggcggcaagttcaaggcccaagccgctgccgactcgctgaagcgcatctttccaggagtcgcgcgtatcatcatctcccctcatctgctgtcagtcgcgcgctgaccgccagtcggggcgtcacagaatgctcaagcgcatgtcctctcgatcccgatgcctggccaccctgttccggccgcagcggcgggctcgaccaaggttgccatccagaagctcgacgggctcatcgccgagcacgatgtcgtctttctgctgatggactcgcgcgagagtcgctggctaccgacgctgatgggtgctagccagcgcaaaatcgtcatcaatgcggcgctcggcttcgacagcttcctcgtcatgcggtgcgtcggtcgtgagtggttggcctactgcccttctgacagacctctgggctttcaacgcaggcatggcgaggggcctcttgaagtgcatagtacaacctcggaaccggctggcgcatctcagcgtctcgcgtgttacttctgccaggtacgctggcttgctctccggcgacacagtacgctgaaactgacgcaaccttctttgatcgattgcaggattcgaacgcactgggaaacgtcggtccctggctcgctcgctcctcacgacgacatcatatcatgctgacatcgtctgtggtcgcagtctctcaacgaccggactctggaccagatgtgcaccgtctcgcgacccggtctggcggcgatcgcgagcgcgacggccgtcgagctgctcgtgtcgcttctttgccatccgaaggggtacgtggatcgaccggctgttaaacggcccgccgctgactgtacattgtgcttgtctccgcttgacagcaattcggcacccgccgacggcctgccagcaaaggatgcggaggacgcgcccgagtacgcttcgccgctcgggatggtcccacaccagctccgaggcgggctcaggacatttcagaacgtcaacctgagcggcgaggcctttggcatgtgcacggcctgctcggttgcggtcagtcgccgtcaactgcacttgcggcggcccgtcctctgccctgctgacgttgcacttcctttcatcgcgctacaggtcgtcgacgaataccgcgcgaagggcagcgagatgctcctcgaggcgttcaacgaccccacctatctgccgaagctgaccggcctcgacaagctcaacgcgcagaccgaagcgctcatggacgacctcgactgggaggaggacgacgacgacaacaagtagcagccccctgtggcctgtacgcctcgcaaagggcgcaagtcgtcgccctgcccattgctcccgctgttacatgctatttgacgagaagccgctcgagctcgtacaaagcccgctcgtctgctctcctcctggctgcgttgaacggcgtgccttgctcaagccgagccgaccctgctggccgtgagccgtttcacgccgggccaatcagctgaccgccgaagaggaacgacgagggagtccccaagctccgtcttcgacccgacctgcctcgttcgtcgacggaacgagtggcggcggctcgcccgataattgcacctgcgagactgcggagggccgtcggctcccgcggggcaaacacgggcgccgctgacgtcccgaagtggctcccgcgcggccgagctatttccgacctcgaaccgtcggccctgtcgccttcggacgacgagccccgccttctgaccggtcgttgaacagaaggagcaccctctgacgatggggtccgctccagcaagcggcggccaaaaattgtcggcctcttgacacagggaagggggggagtagttcggaccccttgtttccttcgcagccgcacaagagctctttctctccttcaaccaccacttcggctcgcctccctcaagctcgcctggtagaccagctcgactgtcgactgttccacttccaagatctcctcgcttgcggcctctcgacaaccctttccttccgtcctcagaaccgaaccggtcggacccaagatgacgtccacgcccgcctcgacgatcgccgtcaacgagcaggagaagaaggtgcccgcggtccctgccgtcaaggccaagaagcctcgcaaggagtggcctgccaacaccaaccccaagcggtggatgggcctccgtggcaaccgcctcattactgccatcacgacgaccggtgcgtcgactcgctcctgaaccgcttgacccccccttagccctctttcctgacacctcgcatgccctcgccctgcagccacgatgggtttcctactctttggatacgaccagggagtcatgtcgggcatcatcaacgccaagccgttcggtcgcgccttcccgctcgtcgcctcgagcggccctgacgactcgtgcgtctcgcaagccgtcttagaagcctgctgccggaagctgatcctgctcttgccgtcgacaggtacgccgccgagatgcagggaaccgtcaccgccgtctacgaggtcggttgcttctttggtgccatcttcgtcagtccttttgtcgcgttcctttgcagctgctgcctgggctgacgcgcctgtctcctccaccagtccttcttctacgccgaggtcctcggtcgtcgtcgcatgatgttcctcggctcggtcatcatgatcattggcaccgtcatccaggtcgccgctatccccggccacggcgcctttgcccagtttgtcgttggtcgcatcatcaccggcgtcggaaatggtgccaatacgtcgacgattccctcgtgggtcgccgaatgcactaagtcacacaaccgcggcaagctcatctgtatcgaggcctccatggtcgccgtcggcaccctcatcgcctactggatcgactttggaatctcgtatatcgacggcgacgtctcgtggcgcttccgtcagtaaaacttcttgcctatgcctgtcgcgccgcctcgtgctgacaattcaccccgcttcctctctagccatcgccctgcagatcatcttcgccatcttcatgtgcttcggcgtctggcagcttcccgagtgcgttccccaccgctttgaccgcctgatctggtcaatatagccaggctgactattttcgtccgataggtcgcctcgctggctcttcatccacggccactacgaccgggcgtcgcagattgtcgccgatctcaatgaccaggacctcaacgacgaggactcgcagcgccagatccgcatcatcgtcgagggcatcaacgcctcgtcgggcgcccaggagggtgcctcgttcggcgagctcttccagggcggcaagaagcagcacttccggcggatgatggtcggcgcttcgtcgcaggtcttccagcagctcggtggctgcaacgccgtcatctactacgcgaccgtcctctttgagaactcgatcggcctcgagactcggctctcgctcatcctcggcggcgtcctttcggttatttacgcgatctcggcctgcacctcgttcctctttgtcgagcgtgctggtcgccgcaagatgttcctcatcggttcggccggccagatggtcgcgatgattatcacgttcgcctgcctcatccccggtaccccggagaccgccaagggcgctgccgtcggccttttcctttacatcgtcttctttgggtcgtgctggctgccgcttccctggctctacccggccgagctcaacccgctccgggtccggaccaaggccaacgccgtctcgaccatggccaattggtgcgtctgctttaaatctttttctcaccttctctttcccctcttccgagttcctccccctttctcctatccgctccctcactattgctcgaggctgactcgtccctccatccctcgccaggctcttcaacttcctcgttgtcgaggtcaccccaatcatgactgctaacgtgcgtttcctttttggccactacgcttgcgcctcgctgaccgcatcccatcctgctcgctctgatgcagattggatgggccacgttcctcatcttcgcgtgcgcgaacgccctcttcatccccgtcatctactttttctatcccgagaccaagggacgcacgctcgaggccatcgacggttcgtccccccccccgtcctcgtcgaggaggttcttgctgaccgatgccaaactcttaccctccagtcatcttcgccaaggcctacgaggagaaggcccggccgacgcacgtcgccgagcgcatgccgtcgctgaccgaccaccaggtcgagcagatgacgcgcgagctcgacatccacggcgacggccagaatgacgccgagaaaaacatggccggccgtggctttggcgactcgcagccgacgacgcgcgccaactcgttctccgaggaggtccgtgaggacgctcttccgtcgcacatgcccaacgtccgtggcgccgatgcctagatgtcaaccatcgcacaacggcccccttcaaacccccttagactctcccgaaggcgcgacccgcgcccggccttaatctctcccgagcacctccttagacttagaaacgtcgcgccctatgcgcgacccctcctagagctgtatccttatgcccggtctgaatagacgtcgctctcgaaggagctgtgaagaggagcagccccggcggtttcccttgcctcgcccgattgactcactcgagacacggctctccacgaccatgatccaccccccttttcaagctttgatactgacctggagtgaaacgagttattattactaaagaatgcgcgtaaggcgcgaggacggaggcgatgcgatgggcgggcaaagcgcagcatacggtaggacgaggtgcaaacagatgcaaagcgcgagtcgtagtccagggggagagcaagtcgaggggaaggctcaaacgaggaccgcagcaccggcaacgactccgacgacagcagcgccaagagcagcaaggtggctgaacgtgagcagcgaagcagcagcgctgccaggagtcgtggcggccgagctctgggccgcgccgctaccgccggcaccggcgctgcggctagccgagttggtggcagtggccgccgccggcgggttgccgatgacagacggcgtgaagacgccgcccgaggggatctgagcgagacacgacatggccgcgtccgaggcagcctgagcctgggtcggcgccgtcgtcgagatcgaggcgttgccggcaaagttgcacgcctgctggtcgaagttgttggcgacatagtgggccgagaagatgtacgagagcttgacctcgggcgagcagaagctcaggcggccatctagaggggtcattggcatcagcgtcgacgctgaagcaacaagaggggtgtgctgactaacaaactccggtggcgccgttgccgccaatgtcatcgcaggtggcggttgtgtcgtcctggccgatgaggctgcagccgtagtcgatgagctcgccgacggcggttggcagcgtctgcgtgttgacgcaagggaaagcacggtcctcgaggcagttgcagaccgactcgtccggcgtcggcggcaggttggtcgacgccgagaagccggtgacgccgctcgggcaagcaggcgcagcagcgttcaagactgacgactgagcgggcgtcgtcgcggcggtgacgttgcggagctgagcggcgaggttggtaaactcctgcgaggtcgtcaccgtctggttgtcggccgagagggtgatgatgccgtagttctgcgagttggggaagtaggagaaggcgacgccgccggaccaaacgttggttgcggcggggaggctgaagagcgtcgggacctcgctccaggtgcgcggccggacctcgttgcagccgtactcgctgaagtaggccgggatgttgaggtcggcgtagccgtctgggcgcacgcaagagacaaagagcgatcagcgacgagagtggcggagagctgaaggcaggaagcccgacacgcactggtaacctcctcccactcggacgacgtaaaagtctcgttgccgcaccagcctgacaaaaggcacagccgagcaagtcgttggtcagccacttaaacgcaggcccagacgtcggcgcaacgcacggtagttgttgaggccataaatgtcgatcgacgaggcgtcagagccgcacgagaggaactctgcgagcgggacgcgcgagttgttgtcgccgtcgctgccaaggcgattaagaatcaaatcagctcgccgactggaggagctggagagcgatgacaagacgtacgtcgcactgtaaccgacgagcgcggtcgagttgatcgacttgaggtaggccttgacgtcgcgggcggccgccttgatgtacggcgccgtgttgctgttgccgtcgccagtgacgatctcgttaccgatgttgaaggcgaggacgttgtcgtatttgttgaaggctgcgacggtacaggaggctttgtcagaatcgggagctggtctactcgcgcgaagggagcgttgccgcaccagaggccgtctgcgcgaagaggtcgagcaggttggtcgtccacgacgggtcggcgcggtttattgagccgttgaggctgccgatacgagggaagaagaagcgtcagacataggcacgagcgcagtcgcgacaggctgggcaggacacgcacgggagcgaaaggtcgatgatcgtgtagatgccggcgtcctcaagcaggttcatgcacgcgtcgtggttgagtgagctgttgaccgagtagacgcggacctgagcaaattaaagggaggtcggtcggcgatcaatcgatgtgaacgcgtcgcaagctgccgcctgcttccagccgaggcacggcgccaagtcctgctgagggggggaaacgcaccgcgttgacgccgagctgctggaggtagggcacatcccgcgcacaggcatcgccgagcgcgagcgggtcgacatacgaagagggctccgggaagccgccgctgcaggggtggagagaggtcaggctcgtcagcgtcgatcaacccaaagggccgagccgagccggtgacagctcggctgggcggctgcggtgggctgcagctcactttgcagcgttggcctcagtgtctgcggccacctcgccagcctcttggtaggcgatgccctggagatgatcgaaagtgtcagagagagcggtcgtcgatcgcaggcctctggcagtggtcgggctgctgctcagggcagtcgggcgagcatcgcgtcggagcgaggtggcgagtgagggaaggcgccctgccctcgtccgacatcgtcgccttcgtctcgccctagccgactgccagagatgaaagacgcaccttgatcatgaagcgggctccgctctcatcgtagaggtacctgagcgagaggcaacaaggaccatcagccagagggcgagcggagggcgatcagctttcgtccgctcccctgcgccatccgagggcgacgcgcaggtgggagcgggagccgtcgcaaaggcgcacgcaccggccggtccgggtgatggtcgggagcgcgctcgcgagagggagcacgagcagcgggagcagcgaaacgagcatcctgaaagagagaagtggacagagggtgggtggtggaagggggtttgttttcgtcccgaccgcttgggcggtcgacgctcgctcgcccaggcggaggccgacggctctgattccggcgcccgttttcgtcagccctgggacgtcggcctttaggagcgccctcgctcgaccatggcccagaaagagagaagagcgagcaacggttcattgtagatgcgcacgatgctcgactcaggcccgcggcagcggctcgtcgggcccgccttcgtagctccctcggccgacggcctcctcgtcactcgtgtccgcctccgagatggccgccaactcgtcgaggttgacgacgccgtgaccgtcgacaaaggtcagcccggcgtcaagcaggcgtgtcgcgatcgtctccaaaatcggatccgagacgtccttttgggtcaggctggcgaaagtataatgcgattcgggctcatctcgccgacgaaacagagtgccggatgtcggtcaggccgggccttgtggatggataggagtgcgtcgaactgggcccgaagatggtgcgcggctggagcaaagtggccccggaagatctcctgctcttcctcgggccagccgaggaggagcgtttcgaggcagtcgtgttcggcggcaagaatcgccgagacgtcgggatcggcgtggatgagctcgagccgccgcaggcaaggaagcctcaagagcaagtcgcccggcagcgctgagctgtcgtaatgacttgcctcaaaggagagctcctggaggcgggggacgtggtcgcagatcgacccgagaactgaggcgcagtcgagaggatcgtccagctgtgagaaagcagagctggcaagatcggccggcacgtccgctagagtagcgtcgaagagctctcaaccgagctcaggcgtccgggaacggacccagagcttttggagcgagccgagatagtaccagagcgagggcaccgtcgacgtgggcccttcaaactcaacgacgctgcgccgccaagcacctcctcgacccttacaagcatttctcctcctgcagaccggcagctcagggcaggcggccggtctcgtctcgctcaggccgcctacatgcccgcttcttagtgacgtgctgatacccatgtcgctgacccatcctggggcggagcacgacgacccggccggcttggcgagccctcagctgcgggagccaaagatccctcccttcagcccaccgcgtcgtccggcatggcctctcaaaaggctgagtcagagacagaccgccttcctgctgaccatcacatacgtatgccgcctcgcatgctgcctgccctcacagtctctttgctcttgctcccaccggcggtcgtcgtcggttcggcgctgccgccatcgcctctcgccgaccctcggcccttcgccgttcctctcctcgaccatgcctcgtcgcttagcgatgcagcagccttcgagcgatccgccacagacgagctcgcccgcgtcgaggcgaggtacggcggtggtcggcaggccgcgctcagcaagcgcgattctaccgaagagtgagctcagcctctgcttctcacctgtccctccggcagcactcctgacgaacctctctactcgtcgatctcagcatccgcttcgacttcctcgcctcgcagggctactccgtcgcgattggcatcggcacgccggcccagacgctgcaggtcgtgctagacactggcattgccgacctgtgcgtcgctcagttatgcctgccgagcgaaggtcaggcatcaagactgacctcccttacctcgttcttccgcagctgggtgaccggtagcgaccaggctggcttccctgctgtcgaccgcttctacgacgccaaagcaagtagcactttcaccaagtcagtcctctgcgcccaaacgactgctgcccctcccgctgaacagccggttccctcctccagcctgacggccggctatagcacttcattcgccgaggtatctccgctggacggctccagcgccccgagggttaacggctacgttgcaaccgacaccgtccgtctcggcggggcaaatgcgtctgaccgctggctcggcgtcatgcgcaattcgagtgtcggcggcaggccatctgcgcccatctcgggccagctcggccttggtctcggcccgcagacggcagaatcggccgcgggatacaatgtctcaactcctgcctggtgggaggcactcgctgccaactggtcggcgccgatgtttgggctacggctcgtccagtttgccgccaacaaggaaacgctccgggctggccagatcttgagggtcgccgagaagggcggcgtcgctaacttgtacgtggcagtctcatcgctcgccgaggacctgtgctcacctctctgcttccactcgcttgcctcagcggcactctcgacagcacaatgtacacgggcgacctcaattggctcgacctcccggccggcagtacacgctggcaagtcgaaatcgaccgactggcgatcaatggcgttgacgtccccatcgattggcgctcatcggcgagctcgggcgcaaagccgcgggcggccgtcgactcgggcatccgggccatctacgtccctgagcgggtcgccgacgcgttctggcaggctgtccctggatccgagatgtactcgctgaacggcgtcccgcgaagcgtctacacctttccgtgcgactcgacctttaacgtccgttctgcctcgtcacctagtgtccagcccaatcatccgagttgaccattgactgacattgcggttctatttaacaggcgactctgacgattggcggcctcgactacacgctcgatgctcgggccctgtcgaatggccctccgatcgacgacggcactggcacgacttacacgcaatgttacggcgacctccgtggaggtccctacctgaacgacgccgaggacacgcaggtacgccttcctgcgacgatgactgaccttgcctcgcgcacgctgttctcctgccggagacgttctgactgggtcctccaactcatctcgcccctcgtccagtggatccttggcgtctcgttcctcaagacggtgtacgccgcctttgatgccggctccgaacccaagcgggtcgcgttcggccggctcgcaagcccgggtccagttttcctccccaccgagaacggcacgtttatcacgggcccgcctccgggtagtgcgggcgagcgtcggctggggtcgacgacaggaggatcgggtctggcggcggtggcggcggtcgccctcggcactgcgcttcttcgttgaggccgattttcgttgagcactctgtactgttgcatttgtcgatacgcgcatgaccttgcccttgcggtcggggtcggatcagtggagaagtgattgggcatgagatcacatggtcgagagatcgagagacgacgtctagtacaagagcaaagagggcgaccggaggcggtctacaagaagggggcgaaagtggccgcgagacagggccgacgggggcacacaaaggcggaatcggagggtattgccctggtcgggcggctccgaagaaaaggggctggtcgaaacgggtggggaaaaagaggtacaaggccaagggcgaagagatcgaaagggttcgtacaaaggagggaaagaaatcgtgtgcgagcgtgtgtgtgtgtcgtcgtcggcaggactgcgtgcgaaagcggggaaaagtgttcgaaggaactgcgggccgggaagagtcggagcgttggggggtcactcaacccgggcgagttctcggccggagaggttgagctcaaagcagttctgaaggaggcggaaacggtcagcaacctgcttcggaccagcaagagggatcgactggggacgcaccatcttcttactcgagacgagcatcttgaccttcttgccgttaccccggctcggctgcatcatgtgattgatcggcctaggctcgagggcggcgccgtccgacttgcgccggagcgcaggcgacgagagcgaggacatgcagaggccggaggagagcggccggaggggctggctcctcgggaagcagggcgaggatgaccgccgggccgaggacgacgggccgagggcggtccgctggtagtcggcgccgccataggacgacgtcgaggacgaggccgacatggcgaccgagggcgctgggaaggcgccggccgaggacgagcccgaggccgagagcgagggcgacgagaggggcgaggcgtagcggggggcgtacgacgacatcatactgccgcagctgctgctggggctgctgctgtcggagctttgggccgggagcgaggtgtttgcgaggtcgatttgaagtcgggcgagcggacggcttgtgcgaggctcgtcggcggctgtgaaggatgagagaaggaggtcggcgtcagggatagaggtcgaaggtgaggggagaggcgagatgttgggaggccgacgacatgctcgggcgacaccgcgtcgagcgggagcccaataggctctggaacaacacgcccaagcatgccgcacctcgctccggcctggcacggcgagcaccatggaggcggataggagtgagaggaacgacatacgcctcccaggtcatgctgcgtccgagctcgtatccgagcccaagcgtgcagctgagcgaatgatggggagagcgcggcacgcgacaacaggctggggacgccagtcgctgcgcgtcgaccaggcccggcttcggctctgccagcgtcctataggaacaagcagcgaggaaggggggaagggagggtacgcacaggcggagggcatgcaagagtgtgggtgtcggaagaaaggagacgaagggataggaagcggggcggtttatgagtgagtggctgtcggaaggtcggagggcggaggggcaaggctggcaaggctggggcgcagagacgttccgcgcggagtccccctgctcgacctggcgcgcagccgacggccgtctcacattcgcgccgccgccgccgccacttgactgacctggcccgctgccaatgcttgctcgctcgacgtcgagagaccagccgagtggggtccgaccggggtcacacgacagctgctcgtccaactcgtgcccacgagaggcggtcgctaaggaaaggagacgagcgaggccgggttcacgttggggccgaccaagtgctccgacactttccgcgccgccggtgggaactcgtctgcgagcgttgcctggggtgagccggaggatcctcgtgcagcatcaagactccatccttgaaatgcgtgctgcgaagagagaggcgcgccggccatatatatcgtgtgcaagactttatcaagggggaggtgcacggatgtcgtaaaggggaggagagtctacgaaagcaagctgagaatctacaactggtggtgacaattcgaggaggctgaggagcgagagatcgtgcgagacgggtccggtcgatctgtgcgacggacgcatgggtgaggtagcaaatgggttggaagcgggtcggtccgagcggctgggaaaggctgggtgcccttgagcagcctgtgcagagggacgaccgacgagcgtgtaagggcgtgacggcagaaaaaggagaagcagtctcaaggccgccggtcgttgacgcgcggttggcgaatcggctgcgagacgaggtgtgggccctgagtcgatgaggagagcaggcggtcagcgacagaatgtcgacagggcggcagtcgaaaggggactcaccgaactctctgcgttgccgatcgggatcgacatccactcgtcgtcgtcgtcgtcgtcgagctcgccgtcggcatccgcagagacttccttgcttccactcgcgccagcagcaaggtcgacgtcgcctggcccgaagaggtcggcgagctcgatgtagagccgcagcatgtaagcctgcagcgtacgagagcgaggcaaggggacgtcagtcgagatgaggcgtgcagctttgctgaagagggagggcgcacctgcatgtcgacgacgcgagccgtctggaccttccagcatcgaccggcttcggccatctcgcgcgcgacgccatcgagctcaggcgtttgcaggctgcgaccggacacagagagggagagggtcagggagagggtcagcagataatcgacgactacaaaaaggcaggcacgacgtagggacgcacaaggccaggaccgactcaagatccgagtagtcgttgttgagcgggacgtagccgtaccaggtcggaaacaggccggcgttccactcgtcaaacgccgtcgccttgagcggcaggccgcgcgaggccatcagccgcgggaagcgcgctgaccaggcgttgccgtcgacgtcgagcgcgaaccggaagcggtcggccgtccccgccgggtccttgctgacaaaggcgaactcgcggccgagctggcggcaagtgccgtcccaccacgagcactgctggccggtttccggccaccaactgaaccagcgccaccaaccggttgaagcgaggtggacgtcgagccagcgggccttccagccggcggctgacggaccgacagtcattcggccggtcgcaccgtcaacggcgagcgcaaccgacggcgtcctgtcgtcgtcgtcggagttggcaaagtgcgatagccgaggccgatgagcgttcggccagcgcggaagctcgtccgagccctttggcggcgcgtgattatacatccccgtcgccgacccgcgccagtaaagccggttcgtcttgtcctcccaggggacgtcgagcgggcccacgcgctcgagccggccctcgattccgacagcaggaatgatgatgtcggagtgatggccggttgaagcgagtgagaggatgggtacgagctgccggtctgcgagcgtgagaacaggttggcgtcagcagaccatctggcaggctgagcggaaacagacgtacgagtgagcggcaaaaggtctgcgctcgggccagccgagtcctggaggtagtagccgtgctgatccagcagctgttgggccgacaacctaggtttagaacaaggccttccgactggcgagcaggctcacgggagagcaggacgcaccttggggttgacgcaggggtcagcagctcggctgacgtcctggaccaaggcgacggtctcccgggcctcgagcgagctcgaagctcgacgggcagagtgcgagtcggagccgttgaaggaggtttcctcggcagcgcgtcgggcgcagaacgcccgccagtcgatggcgcgcgaggcaagctccgtcgctgggagaaagggtgaaacaagaacaagggcaagaaatcgttagtcgggtgctcttgagtactacttcaaggggcgagcaacgtcggccagagcgaatgatggggagagcgacgtacagtcctccagctggccgggctccttcgggtcgagcaggacgactggctggtcggcgaggttgagaacggcgctggataacgaggatcacggtggatcgatcagccgagggcatcgcaaagcgacgatggcagacggagaaggcgcgagagccgcacctaaagtgcggcagcaggtgctgaatcggctggaggagcgcgagatgggccttggtacgcttgtggaccttggccggccggctctgagcacgcggcggcaccctccgagccgcacccgactcgtcgtcgtcgtcgtcgccgtcgagaagcggcgcccaaccaagccctccgggcccgttcgagatgcggacgagcgcctgtttcgcgccctgccctcccggaccagcggccgcccgctcggccttcctcagccggcgccgtcgctcggccggctccattcggcggaacggctcgagcaggtcggtggcccgatggtcatcgacgaacacgacatcgtttgcctttgcaaacgcccaccagacgtcgaagccctcgggaggggcgcggccggcgtagcgcgcgctgtaggcgtgccgggcggcagcgagcgtctggctctggctggcgagcttgctgtggtaggctgcttcgccggcgcggataaagccaaacatagggtgccagggtcgcgttgtcgcattggcttcgccctgtgctgcttgaggggagagcaggaggccagacgacgacgacggcgcgtgtgattgggcgtcgtcctggctggcgacgaatgccgggtagaagggcaggctggcgagcacgctcgtctgcttcgcttgctgctgctttgcccgacaggttcgtgcgagcgcgcgctcggcggggtcgtcaacgagctcgcggtcggtccagtcggtcaccgcctccgccgctggctggatcggcgagctgagctcgaccgcgctgtcaggcttcgccgaccgccatggaaggaagataagcgagcccgagttcggcgacgaggaggacgggccgccgacgacatgcaggaggctggccaacgagagacagagcgcgcagcccaagagaacaagcagggcgagggccggccggcgcctgttgagctgaggtcttgacagcacaggcggcggcgtcgccatcgtcgtcgtcgatcaggccagctagaagggaaaggaaagggaaggaaaggataaggaacgagagcaggttgaagacaagcaagaggaggcgcgaacggcgcgactccggcctgttggcctggccagcgaaaggaaagctcggcggtcctggggcgcccgcggagaggtgtgcagagaggggcgatcgagccggcggctggccgcggtgggcgagctggcggccgggtggtgcgcttggtggcgcatgctgtctccagcagggcaggcaggcaggcaggcgcaagagagagagagagacgcagggcgcgctcgccgtcagctgggcagaagaagggcagcggtcagtcgagagaaggtggccgtcgggggcgaagaagacgaaggggctgacgacggggcttgctgctgctcgggctggctggctgctgcctcatcctcctcgtcctggccgaggcttcggccgccggccggccggccaacttcagcacacccaacccgggcagcactctcgacgacgacgacgacgacgatgaccgttaccagcaccagcgctcaggccgtccttgccgccttcgagggccaccgggctgccctcgacgcccacgtccgtttctgcttttctgtcctcctcatcctgggctgccgccgtcgtctgggcgcgcagctcatccaccgggatgcccgttcgttcgttgacccgaagctgaccttgctgctcgtccgcaatgcttcgctcagtacgacaagcgcgaccggctcaaccaggtccggccgttcttcctccatcgtgaccggctgtcgtcgagctgacgccgccctcgacgccgtcctcccttccggcccgccagctctcgcgcgacatcacctcgctctcaaagaagctcatcttcctcctccaccggctgtcgacgaccggccgagcgacaccgacgacaacgctcgccgatcactatgccgaagcgagcgcgaaggaggtcgaggtgcgcgagctgtttggcgaggtcgggctgctgctgagggacgagcaggaggccaggccggaggcggtcgacggcgacggcgtccctactccgctggccgagcagccaaagcaggcggcaggcaactactggcggtacggcaagcaggtgtgcgtgctgctcccactactctctcctgcttaacccgagttcaagcctggacgagagactgatccgcgctggccctctctccccggaacagctctggaggcgaacaagagtacatcgaggccctctcgttccttcactacctgctcaacccgccgcgcccttcggcaggacatagctcagccctcatctcgctcgccgaggtccaggcgcggctgacggatcccgctagcggcgagccggtacgtcggctggccgcccttcgtcccttcctggaccgcctgcccgtatgccgtcgccgtgctgaccgaccaaacgcatgcggcttgtccctgtcgcgagcagtggttccccgtgacgcccgaggagtacattctcggcctgtcggacctctcgggcgagctcatgcgcttctgcctcaacggtccgtccctcacaggccgcatgcgtgcacgcccccgctctcttcaaagacgcgcaccggctgatgcgctccctcgcctctcagctatcgcaaagggcctccatgacgaggcgatcgcggcggcggcgttcgtccggacgatgaaggccggtgcgtcgccacccctatcccctctgctctaacgctctgccctcgagggcgagtcgctgaccgaccctcctcctcgctcccctccctcttcgctcgcccgaccctcgagcagagttcgacccgctcctcccgctcatcccccagctctcgaagaagcagcaagtgacggcccagtcgctcgccaaagtcgaaaacgccgtctatcagctcgcgatccggcgcaaggaatttgagggccggccggaggtgctcgctgagatggtgcggcggagcttggagcagccggctggtggtggtggggcggggcaggaagctttgagagcgtcctctcgcaccaggcacaagagccgtctgcgagcgccttcgccgacggctcttgtgcctggtgcgagaggacgctctcaaagaggccctcgaaggcgcccatcttcttgacccactcctggagcacattgtagatgctgtcctggacgggggccgtgtcggtcgcgacaaagacgcgtgtccgacgttcgacgagaaaactcttgaagacgctcgaggccgttacgaacgagtcgagcaggccggcaaggtacggcgccggcggcaggatgcgctggacgaccgaggagaaagcgagcggcaaccggtagtcgtagatagacgacaagtggaacgacggctggggcatgtcagcatcgtctgatgacgacggcggcaggtggtacgggatctcgttcgagatttcggtctggaggtccttgaaggcatctgaagggcacaaacacgaggcatcgccagcacctgtcagtctgggttgctgcccggctcgagactactaggagcagactgaccctgcgctgcgtcgtgagtcaggccatcggctttgtggacaaagacaaagagcttgacctgcgggttggctgcgtgggcagcgcaaaaggcggctgcaatctgctcgaagaggtcgtcatagttctacaagcatcgacggcccggacgtcagcaagcaggatctcgggcaacggccgacagcaagagcacggactgacgttaatcgcgtcgacgacccagatgacggcggcaaacttcttcagctcatcggccgaaagccggaggtccttggtgccgggcacgtcccagatctggaacggcgcaaagaccctgggagcaagccggaagatcgaggggatcagcgatggccccggctctggcatccgcagcggcactgcgcgacacgcactcgacgttttccacccgcgtttcatgcgttggtgggatgaagcgaaaggtgtcgcgagggctcatgtcgtggaagagaaccttgagaatcgacgtcttgcccgacctgggtcggcccgcagcagggtagggtcagcaagggcctgcctgctgaggacaagacatcacgacatcggcagcctgcaagagcaagcgcaccttcgctctccgcagacaaggatcttttgtcgcctcgggttgtcgtccagctcggccggggtcggaggcggaggggtcgacgaccgaccggggccggagcccgaaggggttggctgattcgtcgccatatcagagtcctgttggtgaacgacgtcgtgatcgtcagctcgtcgtcggcatgcagtcaagtatcgtactaggagcgcacgatgcaaaccgacctggaccgaacggcgggacgtgagatcggaaagggggagagcggcacgcgtcgagctcgagcggggagagctcctccgtcgagagtgagggtccctgggagaccgctggagacgcgtaaggccgtgcgcctgatctctggattactgtaaagctcctgcgacgtgtcgtgtgagcttgcgaaggcgagaggggagctaggttaggtcgagcgagtggctgtcgggggggctgaagcttcgccggctcgtcctgttgctctgtcctcccgaccacatcctccttttctcgaccttcctcttttcgtctcttagattgtcctcagcatggccgctgtcgatgcccccaacgcaccggaagagctccgtgccgcgtcttacgtcggcttcgactgtgagttctgctccagccgtcgcgtctgctgttgaccgctcgccgagctggccatctcgcagcgtgtgccaggccgagagtgcctgactcgctcgcacctaccgccctccaaccctcgggctgggcgaccaaggagctcgagaagaggtccagggaacccttgcttgctccgtactggcgcatcccggccttaggacgtggcccggatgagctgttgccggttcctcgcgccccgcctgcgcgctgccccttcacgtccctcttcgccgaccggctctctcgcaattagtgctgaccacaagtcctctcggccactctcgacagccatcacgcagcaaatcgagcacaagctgctcaagcgcggctttcagtttaacgttatcgtcgtcggtgcgtctgcttaccttgcagaagcttgctgctactcggctctcgacgcgccccgcagcctgccaccgcgctcgggtctgtatgctgaccagcgtgcttctcgcaccttgtggcaatcgcttgtgcaggccagaccggcctcggcaagtcgacgctcatcaacacgctctttgcgtcgcacctgatcgactcgaagggcagggtcgaggctgagcaggcgacgcggtcgacaaccgagatccacgcccagagccatggtgcgtctctttgggtcctcgccaacatgcgcgttacaggccgggctcgcagagccgcccttgtctctcgtcggccgacgacgcgcagcatgactattgacgagtccatcgctgaccctgctggccccgcctatgtctgcccgactcgccaccagtcattgctgagaacggcgtcaagctgaagctcaacatcgtcgatacgcccggctacggcgacctgatcaacaacgagggctgctgggacccgatcgttaaatacgtgcgcccttctgttgctgaggcttgcccttcctctcgtcacacgagctgacgactcgtcgtttctctaacctcagatcaaggaccagcactctgcatacctgcgcaaggagctgacggcgatgcgcgaaaagttcatcaccgacacccgcgtccactgctgcctcttcttcatcaacccaaccggccactcactcaagccggtgcgtttcgctcggcgtgctttctgagcaaagagacgcgaccttgactctgcgcctttctcgcttccgtctcagatcgacatcacggtcatgaagaaactctcggaggttgttaacgtcgtcccggtcatcgccaagtcggactcgctcacgctcgaggagcgcgaggccttcaagagccgggtcagtctgtcttggcgcagtttgcagccctgctaccttcggctgacaactgcattgtcgcccctgatagatccgcgcagagctcacgcaccactcgatccgactctacccttacgacacgatcgagcacgacgccgaggagctcgcgctcaacgcccgcattcgcgagatgattccgtttgccgtcgtcggtagccaggagaacgtcatcgtcgacggcaagcccgtccgcggccggcgcaaccgctacggtgtcgtcaacgtcgaggacgagcgccactgcgagttcgtctacctgcgcaacttcctcacgcggtgcgtcctccccactggccagcttgcttactctgctgccgatcagccgtagactgacagctgacacgatcgttaccgatgctcgctcgcaggacgcatctccaggacctgatcgagtcgacggcgctcacgcactatgaggccttccggtcgaagcaggtgcggcctgctgatgtcttcattacctcctgctgagctgaccttctgctgccgccgccccctccctttacccagctgctcgccctcaaggagaacacgagcaaatcgcccgtcaacggcgcataggacccctagcgatcgaccgccgtctctccattctgttatccttccggacctgcaccagctgccgtacccagcccaccataccacgcaatttcttcccggccgcaccggcggcggcctcagaccggcaggcctgctgccgatgctccatgttaccctcttccgtcttctgcccccgtctgtcctcatcgcgagagacttgttcgaaagccagaacctgcgccctattttccgccctgccctgcccgtccacccgtgccgcaggaatcgtcagcccctggtcagcccgccggtgttgtcaccggcacgagtgcgcagcagggagcttcgcgccggccacgcagagacgaatcgagccccggcttctgtcctccgcctcccaccttcgtcgctcgccctctctctatcccatcatccccgccctgaccctcttcctccccctttttgcggcaagatgctctcgtcggtcgcccttccgcttctgctcgcctcgacttcggccgcggcgctctctttgccgcacgccacacgcgagcagccggtccgaagccttgcgcttaagcatacgccgcatggccttcgtcgagcggtcgacgaggaggacgatatgcgggcctggatgcagcgtgagaaggccaagatcaacggcaagtacggcagccagtccgtcggcgagaagcgcgacgctaccgtccagtgagttgctttcctgccccagttcgcgttgcggagggacgaccggcgttggtgctgccaggcgaggcttcgccccagccctcggctctcgatgggtctcgagtgctcttgagggtgcctcgcttcggtatcctgccaccatcctgcggttttctgggctaggagcttcctgtgtcgacctgctcgcggtttcttcctgactgcggcgctgaccgcgagcttccttcgcctcctccctccgtaggatccagaaccagaacctcgatgcctcctactcggccgtgattgaggtcggcacgccctcgcaagagttcaatgtcatcctcgacactggctcggccgacctgtacgttgtccttactctgccgtctggccaggcagagccggctgcggcggcagcgcgtgcgtcatcactcgatatgggtacgtcagcctgacgagggcctttacattcctctacagctggctcgccggaagtgcctgcgctgccagcgcctgccagggcgtgaccgactacaacacggcttcgagcagcagcttcaacaagtgcgtctgtttgccgagcctctcgcgctgtctgcgccacccctggcgctcgatcgcgtcggctgccgaacaagccagacgctccggaaaaacgagggctgacgctctaaatctccgtttgtttgctccagcttgacgacgcccttctcgatccagtacggctcgggcagcgccgtcggctaccttgcgcaggacactgttacgctcggcggcatgacgcaggccgctcagacgtttgcgatcgtcaccgacaccgacgccaacctcatctcgaacccgatcagcggtctcatgggaatggccttcgagacgctcgctgagtcgaacgccaagccctggtggcagaacctcgctccttcttggagcaaccagctgtttgcgtttcggctcgcgcgctaccgcaatgtccgcctcgcctcggcgaccgagcaagagggcggctacgtcgacttgtgcgtctctgaccaggtctgagctgccgctgctggatgaccactgacctactcgtgacgcttcacccttccttccagcggcgctctgaactcgtcgcactacaccggcgacatcaactggatcaacctttctgccgcgctctactggcagattccgtgcgagagtatgacgatccagggcacgacgatcgacatcaacacgacgacgacgacgcagtcccgcaacccgtttgcttcgtcgacgacaaccattggcccgcctcaggtcgcggtcgataccggcacgacgctcatctctgtcccggcggcgacggcccaggccgtctttgctgccatcagcggcgctgcccccgtccaggagcgcggctacgagggctactacactttcccgtgctcgacccaggtcaacgtcagcgcagtccctctacactactccgatgcgaagcaaggctgacacgctctcccacgcttcgacagctgacgctcacgtttaacggcattacgtacgaggtcgacccggccgactttaacattggcccgctctcccggggctcgtcgcagtgcctcggcggcatctttgcatcggacctcggctcgagctcggctgtctcgtggatcctcggcgacaccttcctcaagaacgtctactcgatttactcggccgagtcgagcactggcaaccgcgtcggctttgctgccctcgctgacggcagcaccgtctcgtctggcaccgccggctcgggctcgtccggagtgacgtcgccctcggctggcggtaattcggccggcgtcgttcaggccgccctgtcgagcgcctcgctcggccttgtcggcctcgtcgccgcctacgtcgcgctttgattcgcctcgcatcacgctatcgccctctgccatccggctcattccccctgcatcaccatcaattcacccacgcccttgctgtagccctagcctcaatcctgcattctcctcccgtccctcttcttccgatatacactatgtagagcttcaatctgcagcatccgtcgcatcccctgtgtacgcatgacctgtagtatctgcaacgggtttgggcggcggggcacggcgggccttgcgaacgtttcctgtcggacccgacgacggcggcctcagaggtcagtggctgccggctacacgtgcttcaagctaccaaggcgacaagagccgcgggagttttgaagcgagggcagcaatgagcctcgggatggccctggagatagctcgagaggcgcgtgccggctcgcggcgcggacggagaacaaaagggggtgcggggaagtgcgcggtttcagaggcgccttgttcgacgagggcggccgctcgaccactcaccctccagcggccactcgcaccctcctctgccccgtttccagcgcccttcatgaccctctttagctcgccgctcgtcccagcgacgaccgacggcgtctacactgagacgtccgactcgcagtcggagaccgagcagctcatcaccgagctcatctcgcggcaccttgctcagccgggcttcgacggcacgccgtttgtcctcctctcgagccgaccctgtctcaatgccgtcccgcgcctcgctgaaccctactcgcttgcttctttcatcaggccgaagctcgagaagaacctgcacgtcaactatctcggcaagaacctcttccagctgccgggagccttcgtgagcctcgacgcgagccggccgtggatggtctactggatcctgcactcgctcgacgtcctcggcatcgcgctcgacgacggcaccaaggctcggtacgtcctcatcctcagcctccaaggacggcttcattgagaatagcgaccagacgcggagctgaccgagagctccttcggcttcgaacccttgcgcgcaggggcatcgagaccatcctctcgtttcagcacccgtcgggtggctttgccggcggccccggacagctgccacaccttctgccgacttatgcggccgtctgctcgctcgccatgctcggcggcggctgggagcggatcgaccgcgaggggcttcggggcttctttagccgcatgaagcgcgcaaacgggggcttcaccgtctgccacggcggcgaggtcgacgtccggttcgtcatcttgtctcgctgcgactcaccttctcgctgggtctcagagactgaatcagctgtccattagtggcgtgtactgcctgctggtcgtggctacgttgctcgacctgctcacgccagagcttgtcgagcggacggccgacttcatcgcatcgtgcgttgggcagtcaagctgcacaacttctcgtcgttgacattgcccgccctctctcagctgccagacctttgagggagggttctcggcctcgccgtcgtccatctcgaccacttttgcctcggcctttgtccctccgccagtggcttccagcagctcgaccgcagcctacttcccgccggcgacgcctctcggcgaggcccacggcggctacacctcatgctcagtcctttcgctctcgcttctaacggccttcggttcgcattcctcgcctgacaagcggcagatcgactacaagagcctccttcgatggtccgtcatgatgcaagcgtcggcggcagatggcggcggcttcaagggccgggccaacaagctcgtcgacggctgctacggctggtgggtcggcggctccttcgccgccctcgagagcgttgtccggccagtttccgaggttgaggctcgccgtgacgtcaaggaggacgccatgctctacgaccgaggtgcgtgcggtgaccccatcccaccgctaccgccgcctgtgcagacgctgacagcgccttcatccggtcttggaagttgctctgcaagagtacatcctgctgctcgcccagcatccgaaaggcggtttggcggacaagccgccaaagtgcgacctcgcgggtcagctcacgcgaatggtcatgcagccgctgaccggccttcttacccactttttcaggcgagccgacttctaccacacggcgaacaacctctcgggtctctcgctcgcccagcaccggctcatccactcagagtttaagtcggccgagctcgaggccggctgggtggccggaggtaccagcgacagcctggaggagcggcgaaagaaggctttcgcgtccgcactcggctgggtcgagatcgacgagcagttcctcgctgttggtggcgagcagaatcgcgtggtgcgaagatcggctcactcactgagctcggcggttcctgacctgtgcgtctctctcgcagaacacgacccacccggcgttcaacattcttctgctgcgggtcgagccattcatgcgccacttctacggccagcccaagcctgcggccaagcccgccgcatgatccagcccagcgctctgatttatgtcctcaagtttggagtcgcagcgtcatcagagtcgtaggtcgtctcggaagggggttgaggaggggtagccggcagagatgggagagtatcaagcgggaagcgataggtcgtccagaggaggtcatgaatggaggattcaaagggaaagaagagcgtgggtgggtcacagacggccgcctcgccggctgcgggcgagcacgccccagacgatgatgccgagaccgagcgaggcgaggcagaggaagccaggcagctggcggagcgtcatcgcgttggcccggtcgggccgacgcgttgcatctgcttcaggggacggcttgactacgacatcgtcggcagcaacgaacgtaagcgcgacggcttcgagcgagtcgagccgggactccaaagtacgcatccggtccgagagggtaacgaccagagcccgaagccgtgcgagttcgtcgatgtccagatcgtagactgagtcagggctgaacgatgtcatgccgagcgagggcgtaccgctcgacttgcgcggcttgatcgtcatgatgcgccgttcctcgcggtctttccctgcagggccctcgtgagtgctgccgaggccgtcgtagctcttgcgctcgctccgtttcgaagaggcagctattcccgatggaaggctagagactggaccgtcgggcgcggccaagctgtcgggcgctggattgaaagcgagttccgcgtccgatggtggggcatcgtcggccgtgctacaagtagagttcaatggcagattgctccccagctgcagtatcggcatcgcagcctccgcaccctgcattgaagaccggcgccggtagcgtcgctcactctcgcgactcttgcgagcgctcgggctctcgagaacgtcgttgtagatgtcgtcgtcgtcgtcatcagagccagcctcggacgcgccgctgctgctgcgctcctcccagccccggacgaggcgctcgactggcgtttcgtcgccgccctcgtctgcctcaatgacggtagacgcctgacgccgatgggggccggcgctgagactcttcgaaagctggaagagaagtgtgtggaacgggggcccctggccggtcgtccttcggatcgaaagggaggtcagcacggcgccttcgcaaagcaacctgccagtagacgaagcaactcacgcccaagcaccggtctcacccttcaagaactctctgccgttgagagctaagccgccgaccctgatgccattctcgaccggccgcgactggccgagccacgccagcacgtcgcggacgacaggcttcgccaggccggcctcaatcaggctggcctcgagccatagcaagagctgaccatgcgtccactgcgccggatctttggggagtttcgcgagcagctcgacggagctgtgcttggaagtcgaagggaagatgaaggggagcgagtcggcgcgacgatggccccgtgcgaccggcgctcgaggcgcgtgctcgccagccgggggcggcgggacgggcagcggccggggctgctcgctcatcgagctcaggctcctgaaagcatttcagacgcagttgatcagctctcgggcctgccgacgaagcagccacagcagacagaacgcacctcgagcccttgtgcgagggcacccagctcggcgaggctggaacgctgttgctccgtgtcagcgtgccgctcgacgacgtgatggcggcatagggatgagtgtctggcagccaggaaaggtcgcatcagggagccagcccctgtaagagggccagtcggatcgctcaaaagagacgaactggtgctgtgcttggagggcgcggtccgagcgtcgctcgactgttgcccataggacgagcgcgacctcggaggaccggccggtctcgctgccgagttggacgtgccgacagcagagatctgtcgttcggcaggcgcgccgttagccatgctgccaggagctgacggctgaacaggtgggaggaaggggtgggtggggtgagagaaggcgggctgaaaggggaggaaggttgaaaggcgcgagtgccgagcgggctgctgcgcgggagccggtctgtcccggcggccgcagcgacgcagggtcaacgccggcaagctggcaggaaaagcgagacaagtgacatgcgatccggcagttgagcgcgctgctggacgtcgaacatggttgtcaacagtgaaatgtcttgagatcacaggcgcggagacgaccgacggccacgtcctcattctgcctgctcctgtcgctccgactctcgctcgaaaccgtcgacttcgaacatctttcctcgacgaacgcggacggggataaacggaagggcatgagattcccagaggactcgatcaaaaagcagagggaggatcaaaacggaaaagaatgacgggcaaaggcgagagcgcggacgttgacggccgggcgcaaacggcgtttagaagtcgacgtcctcgtcaagggcgtcggcgtcggccgagtcgacgccaacctcttcgtagtccttctcgagggcggcgaggtcctcgcgggccctggaagccgagcggcaagcacgcagttgggtcagcaagggtgtctggaggggatcacgcgagaaagaaaagtctggacgtactcggagaactcgccctcctccataccctcacctacgtaccagtggacgaaggcgcgcttcgagtaaagactgcgaaacggggaacaggtcagcaggaaactctgggcaggcgagcgaagcgaagaagaagaggcgacgcacaggtcgaacttctggtcgagccgggcccaggccgaggcaatggcggtcgtgttagagagcatgcagagcgagcgcgagaccttggcggtgtcgccgccggggacgagcgcagggggctcgttgcaaatgcccagcttgaagccggtcgggcaccagtcgacgaactggatcgtccgcttcgtcttgatcgaggcgatggcagcgttgcagtccttggggacgacgtcaccccggtagaggaggcagcaggccatgtacttgccctggcgggggtcgcacttaaccatctggttcgacgactcgaagcacgagtaggtcatctcgctgaccgagttctgttcgtggtaggccttgtcggccgagacgatcggcgcataggtcgcgagcgggaagtgaatccgcgggaagggaacgaggttggtctggaactcgttgaggtcgacgttaagcgagccgtcgaaccggagcgaggccgtgatcgacgagacgacctgggcaatcagccggttgaggttggtgtacgtaggcgactggatgccgaggttgcggcggcagatctcgtagatgctggagcaggcaagaagcgaacgtcagcattggcgccaagcaggcggcagctgggggaccaaggacgcacgcctcgttgtcgaccatgaacgagcagtcagagtgctcgagcgtcgtgtgagtcgtgaggaccgagttgtagggctcaacgaccgagttagagaccttgggggccgggtaaaccgagaactcgagcttcgacttcttgccataatcggtcgagaggcgctcgaggaggagggcgccgaagcccgagccggttccgccgccgaacgagtggaagacaaagaagccctggaggcccgagcagttgtcggcgaggttgcggacgcggtcgaggacggtgtcgacgaggtccttgccgaccgtgtagtggccacgagcgtagttgttggcggcgtcctccttgcccgagatgagcgtctgcgggtggaagagcgacttgtaggcgccggtgcggacctcgtcaatgacgttgggctcgaggtcgacctgtgaggatgggatggaggccgaggtcagcgcgtgtctgggagaaaaaaggggtcgacgaggaggacacacgtagagcgagcgcgggacgtgcttgcccgagccggtctcgctgaagaaggtcgagaagccgtcatcgttggccgagggcgagccctccatgatacggccgtcgggctgcaggatagcaaagcaacggtcagtagagggccgtctgagagcagatggtcttgcgaggccggaaacgcacgctcaggccgtctggaagaaggaaggggggaagatgtcaacacgcgcgttcgagctcggcttgggcgacgacggcctcagcagtcaaggaaagcaagacgacgcacgctcgagggtgtaaagctcccagcaggcgttaccgatctggacaccggcctggccgctgcattgcgtcgggacgagcaaaggggaaggacggtcagcaaggctggctcaaccgggcgtgaaagggaaacggtcgccacgccagtgaagggccgacgcgcgaaaagcacggctcccctctcgattgtggcacccgagaacgacccctcgcggcagcccggcaagaagatgcaaggactcacacgtgaatggagatgacctcacgcattgcctgtgagcgaagaaaagggcaagaggtcgcaagaaaggaaggaggagagggccaagtcgaagagtcaacatcgcgcgtcgaagggaaggccaggagggacgggctcgctcgattggcctgccgcccgctcgtccgacctccggccaagtgaggtccgtccctatccggctgaggactacgcacgaagaacgaagaggatgttttgcttgaggagaagcaaagagaagggggtaggacacgagggacctggtgggagcgatgggggcaagaagagagagacggccggccggcgtggcaaaagcgacgcgcgcgcgcacagggaagctagggttaattgagtccctgggcgcagccgaccgaccaacccacctgctgccctcctctccaccctctgccatcctcattctagtcgtgctcggacggggcgcgttgagatagcagtaatggtcttctgtcggtccgatcagaccacgagtctggcaggcctcaacctgcctcacgggagcagcagcgctgactgctcctacccctgtcttcgcccacccctcctcttcgacaccttgcaggcaccagccactttctgccactcgtgttgctgttgccgttcccgacaggtgcgcttgatcggctgcttcgtccaccgggtcgacctcgagcttacctgcggcactcgcctctctttctcagccgcgccgttgctcgtcgtcctctacctcgcctcgctctacctgactgttcgaccctggtgcgtcttgccgctccggacgacaatgagcttgggctgacgcctgtcgtcaacttcttcagcgtctactgctcggtcatcatctccttcgtcctgctctcgacagcctatcacccgctctttccgccatcaccggcctcctctatgaacctcaccccgacgaccggcctcgtcctccttgacctctcgctcccgctcgcctacctcggcccgcccacgcaggccgatcctgaacgcggctggcttgacctcaatgctgggcacctgcttgatcctgtttgggttgcgttcaagcaccggcccgacctcgtcgagctcgagagcgccaagctcgaggcggttcttcgtgccgagacagccgcgcgagtaaaggccgaggcagagcggcagctggcactcgatttcgaagcagagcgccggagtctcacgcgcaaggtgctcgactcgctcgccggcctgttcgttcgcgcatctgccccgacgccgtccgccccaccggtcgcgctttcacgatccgtgcacgatcgggaccccacaacctcgcgctgggacggccggaggaaacggctcgacctgcgcttcaacggcatcggggcgatccttgactttggctttggccggagcgcagaggagatccagaaagggctcgaggcggacgctcgacggagggtcgagcggagggcggcagaggccatcaagggccagggatgagacgtccgtagtagtaaggatgacatgcgcctgtacaacgaggtgcgagagggatgaacggagggtgggctgaccgaccaacgcgctgacccaagttaaggggtgcagcggcggcgcgtcgcaagaatccgctcatccatgctgcgccctgcgccctccgacccccactctgacgccgacggccctcacttgtccgtccaagctcgaaccgccttgcttggctcgctcgacgacaaggaaggatgacgacccaggccttcgtgagtcctctccttcctcatctcgccgcccaggctgaggcaggggccgaggcggacgggtgtatgcgttcggctgctcgtctcccggagcagcttcaccatccccgcgcacccagcccctatcctcacaagatcctctgctgacacgctctcctctctgccgccgacctgcgccttctccagcggccgctcaaggtcaaggcgcccgcccaaccagcaatctcggcgaccgctgcccatggcatcgtccagactagtctcgccggagcccagcaacagcagcagcagcagcaggctcaggtccaggctcagacgacggcccagagtcagatcacgttcgctcagtcactctcggtcgttcggacgctgatgagcgtcagcttcggctgcatcgcctacctccggtgcgttcctatcctcgcctcgtggcgactgccgtcctccactttggcccacttgagtctgattgacggtcgagctcctttctctccactctagcggcctgctccccgaggagaactttaccgacaactcgacgacgcacacgctcgcggccgacctccgaacggccgcctcgcagggcgacggcaagaagcctgaaaagggcgcgctcaaggtcaagactatcaagcgcaactactcgtccgtccagtttgctcgctcgatgctcagctcgatgggtctcgctgactgtgcgcctcctcttcgttcgcgcaggccggagggcgacaagctaatggactacctcgtacgtcgtctcgcaacgaggtgacatcagaccagtgtcctgctgacccttactccttgctcgccatgacaggagaagggagtcatggacgcgattgagaagaaggtgtggcctgcacgcatacactcatcctcaaaggagaaggctgacctgctattgccgcctctcttagtacctgcgcgcgctcgtcatgagcatttacatggtgatggccctcgctccatttctcactcgtgctgactggcactgacactgtcatcgccgtgctctggcagaacccggacgaccccgccaagtgcgtcgactctagtgttgcaagcgtgcacagagccactctgacccaccactttgaaccctccttttgcagcgtcatcgaggttcgctctagacttggcttccccttctcaccgtccccgatgccgtactgacgcctgagccggcctgccagacctatacgttcaacttttcgtacccgacgctggccgatgggacgacgatccccgtcctcgatgtcaagtcgaccggtggcgacgtcccaatggcggcaccgcgcacgagcacgcttctcgaggccgctcaggatgggccgatgacggtcggcgcggtcaagaaggcggttcgcgtgagtttcgttgaccagtgccttgaagttggcggcccttgctgaccttgggcgactctttgcagcacatgatcaagcagctcatactcctcacgcagaacctagccgatctacctcgtgcgatctgcgcttgcagacgctctctcgttagcaccactgattgacgactcgcttctcttgccagggaagcgctgcctctcgttcaagaccttttacgaggagcacacacctgacaagtgcgtccagacgatggtcatgtctggctctgacagagccggtcaagctgaccggctttgccgtccgcctctcgcagctaccagccgccgatgttccgcgaggccgacctcgagaaggagcgcctctactttgcaactcagtcgcgcaaccaggcaccggacctctcgacgtgcgtcgaccgctgccctcgatgggtcgttgccttgattgacctcgagcttgcgcaccaccttgcagcgtctcaaaggtcgacactggattccacggcgtccagctgacgatccggtccatcatcgacctcttgccggcctcgtccgaagccggcgacggcctgccgtatggccaggcgccagagggaaagacgccggccgagatccgagagacgatgcgcaaggacgatgaggcgcttgagcgggatgagttggcgcgcaagtacctctggaacgccgaggaggaggtctggaagggccgcgaggaggatctcgacgccggtgcgccgcctgatgaaccgctcttgatgccaatcgttgctgactctcgagttgcggcccgcagaaggcgagcccgacccggacgtgccgccatcgcaggtgcccgcctcgcctccggtctttggcaccgcctttgccatccgcaaagctggcgacatctatgagcccatcgccaaggcgacccgccggcagatgctaaagggcaaggggcaggatgccgatgaggagaccgactcggcacacggcgtcgtcgtgcccgacgagagccccaccgagcatcggagactgtcgagtgtcgtgcgtcaccttcctcctttgacaaacacgacactgactgattccgacgactcctgcagcttgcggccggcgcgacgacgaccagcgagacacagccagtcgatccagccttgtcctccccaactcaggtcgcggccgccgccaacgtcgacgagagtgccgtcctcgttagcgccatggacgtcgacccagcgcctgcgccagctggcctcctcgctccagacggcggctcgctcatcggcagcgctctgccgaccgtcgaccaagccagcttcacccaggctcagtcatcaacgtccaaagagggtgtagccggcccttcgaccaaggtcgagcgcgagcgcaacgcgccagcgagtgacgcactgtcgaccgacaagaagaagtcgtcgcgcaaggccaagagccagcagccggctaacgtgccctcgacgccaccacgccgctcgcagcggacccgcagccggacagagctgggcggcgcgagtgcgaggcagccgtcaagggattcgcagggtcatggcgccgactgggacccctgctggtgtggcgacgaggacgacggcctcgacatggtcggctgcgacggacccggttgccggcgcttcatgcacggtgcgtctccttcatgctcgacgtccacctgacagcatcgctgacattgcccaactgctctacttccctcttacgagtctggtgcgtcggcggccgctcggcagacaactttgaggccggagagcgcttcctctgcgagtcttgccggcttcaggccgacccgcggacggccgcctggccgcaggcccgctttgacgaatgccggcggctcttccaggagctcgccctcttccggtgagcgcgcaatgccgcgcttgtcagtcggcagacgctggctgacatcgttctgtgcgcaggcgtgcgctgcgggtcgcctatgacgagactctaccgtcgacgctcgacgccctggccaagcggctgcactgctcgtcgcccgatgccaagggcatatttgagcggctcctgcgcgagggtgcgtcattgcgagcgacataactgtcccgtcgctgatcttcagacgacacttcttacggctcgcaggcttcatcaagttaatccggacgaagtcgcacaaaaagggcatgtcacacgtcaccaaggaccactacgtcgtcaaccggaccaagtcgaccgactcgcaggtctacttcaaccggcatgaccgtgcgctcgaagaccggctgtaccagctgcgtgcgcttcaggcccacggaggaccggtgcgtccgtcacgcctgcggcagatgagtgcgcgagcagcgctcaccactgaccttctccaggacgtcacgatggacgctgagccggccagtctgtcgcgtgcatcgtcgatcctctccgacgttccaggtcagacccagtcacatagccgtcgtcgaggcccttggcagctgaccaggctcggcgacgccgcccctcagacgacgcaggtgctgccgcgcctccagagcgcaacgtgtcctcgcccgtactcgccgacgagagccaaactcagccggcgacgtatccgtttttggcacccgcagcagccggcccgctgtccgagtcaatctactcgtccgttggcggctttagcgccggtcaggggacacagttcctccctggccctcctcagtcgctggcgtccttccagacgccaaagcgctcggcacctccgccaacactcgatcggggcgagggcggccggtcgtcgacgctccggccaagaccaaagaagacacttgcccgggcctttgacctcgaacttgaaggtcgcaagcgggcgcgaacgtcgcgggtcggtgtcgcgcgctcgacgcttgacctgacggtgtaagctggggacttgggcaagcggtggtctgggacgccgagttggaagcggcgaagttgctctgaacttttgcacctgatgacttttcacgaccgaagacgctgtcgacgagcgctcatgcctcgctcaggacgggggaccactgggacgctcagacggaaagggcggcacacgggaatcggaaagaaggagccatcgagagctcaagcgcagagcgaatctcgtgtcgtagcaagcggcatggtgatatgagatgtccgcaacgaagttccttttacaagcttgagacttagaccctacgctgaaggctccagcggcggcgtccgctggccagcctcgccgactttgatgccgacgtccttgccctcgctcgcgaagcgctcgacgacgcgccggactccggcttcgccgtcgctgacgctctcgagccggcgctcgcgctcctcaatgccgcgcagctcggccggcatgacgtccttgtcaaagtcgagcgagggcagagcgtcctggacggccgagaggaacttggccgggtgggcagttgacagcgtgacgaggacattcttctcggcactgaggaagagcacacatgaatcagcgcctctttaaggacgagtgatgagatctcgggcgacgtacagggtcgacagcagcgtctgagtgatattgaggccgaccgccgtgtgcgggtcagcgacgtacgagggcgaggcgccgtagtactgctggatcgtctgcgaggtcgagccgtccgagacgcgctcggcgatgaaatcgcgccgggcgagcgcgagcacctcctggccgacgtcgacccggccatcggccttgaggctgtccatccaccccttgagcgtcttgctcgcctcggcctcgctcttggagccgccagcctcgtaggcgaggtaccagagcaggcgctcaaagttgctcgagaccatgatgtccatcgccggcgagagcgtctccttgacctcgacctgctggcccggggccgacttctcgtagacgcccgtcttccagaagcgggcaaggatgtcgttctcgttggtcgcaacgacgagcttgcccattgggagaccgagccgcttggcgtagtagccggcgaggatgtcgccaaagttgccggtcgggacgacgtacgacggcgtcgtgccctggggcagcgcgaggaacgagtggaagtagtaggtgatctgggcgaggatgcgcgcccagttgatcgagttgacggcgccgagccggtgggccttgttgaaggccgggtccgagaagagcgccttgacggtgtcctgacggaggcgagaagggtcagctgctgcggaccgttgcgttgcgtggcatgctcggtgcgcacctgacagtcgtcaaaggtgccctcgaccgagatgcagtggacgttgtcgtcgagaaccgacgtcatctgggcctcctggataggcgagacgcggcccttaggaaagagcatgaagatctgaatatcggccttgccgcggacgccgtaaatggcagccctgtgaggtcggtttcggccgggatcagaagagcaggaggcaaggtgtcagccgtcaagaatagcacaagccggaccgccagccggcgggcaacccaggccgaaaggagcagagtgacgcacgagccagtgtcgcccgaggtggcgccaacgatcgtcagcttctcgcgctcgtcagcggcggccttgccggcgttgcgtcgcttgaggaagtactcgaagaggttgccgaggaactgaagggcgacatccttgaaggcgaacgtcgggccgtggaagagctcgagcacgtactccttgtccgagatcttgtggatcggcgtcgtctgcgggtgccggaacgtcgcgtacgaccgctcggcgaggtcgcgcaggtcggccgacggaatctcggcagcggggacgaagagcgacatgagctcaaacgcgagctcggcgaacgagagcccgcgccacttggcctcccagtcggccggcagcgtcgggatcgtcgtcggaatgtacaggccgccgttcggggcgaggccggtgaggacagcctgcaaagagaaagggcaaggcgtgagtcaagcgccaggtcgggcgcagagccgcctcgagcagggaccggccggaacgcacctcctcaaacgtcaggcgctcgtcgcctccacgggtggacaggtactcggtcatgcaagctacaaaaggaagaaaagaacagagaaagagtgggagaggggagaagagcgaggtcgacggtaagggctggccgaaggcctccgttccgccagggtgccagagccgccgagcagagccgccccttcgacttccacccatttctgttgccgccctcaccttctcgccttcgctcaacgccgccttcagtcgcctgctccgtctcgtcatcatgggaggcgccaatcgtacgtcgtccagtctgcagtctcgaggctgtcgaacaccgagggctgaccacgcttccctcctccctccccgcagtcgaggtcttcaagttcggcttctacctcttcttgtcagtcttggtgcccatgtctcttttggaccggagctggccgaaggctgaacgtgcttacttccttcagccctattgctgtcatggcgcatttctcggacccgcgctggtacaatgagcatgtcgcgcccgtgagttcctgcaccgcattcaaggcggctgccacctcagcttccgccgtcttcgcacccgattctcgggggtccgacgtcgagcggctctgagctcgaaccgaggtccaagagcattagactgacgcccgagctccttgaacttgtccctccttcgaccgatcctcgtcgatcctcgtcctccggctctggaccccgctcgcctgcgccgccccttcgcctcgcgaccacctcaactatctctcactgctcgctcgcctgcttgccattctccagtatcgcgccgccttctggccctcgcccgaggccgtcatcaagcctccaacctcgcgaccagagatcgaggccgagctcgcgcggatcaaggcctcgcgggccgcgcagcgcgcgcacgccgttagcagctccacggccgaactcgaccagggccgggctgggctccggtcgagcgttgctgtcggcgacgagggcagcatggaggacaagcgggcgctgacgccgcgcgaggtcagacgcgagcgcgggctcgacaatggtgtcctcgccggcggtggactgtggggcggaggcaaggagaagtgggtatgaggacgccaggcgcacgtcgagcgacgtcgaggtcgaattcttcctgttttcatcactaccggtctatgttactgtcctttgaacccttcctgcctcgtcgctgggacggactcgattcgtctgtccagacccatgtatcccttacagcacgcccttgagcgagctcttggccgcaccgcgcgctttgggcttcgcaagggccgagccctccttccagcccatcataaagacgacctggaacgtcgcagggacggcggtcgcgcccttctcgaccgagtcggcgtcaggcggggcggggacgccgtgaagcgctgcgagggaagcagcaaaggtcgaatgcggcgtaagctcgagatcgagcgaaaagaagaaagacagcggcgtgcgaaccggtgtagatcgacgacgcagcgatgagcgtgtcgcgcttgatgaatggtttgctgccatgtggaccgatgaggaggtcagcaggtgtacgcgggcgtcttgaaaaacaacttgagccgcaccggccaaagatggcgttgccctcgcccatgtccttgagatcctgcatcagctcccacatggaagggtagcccatcatgatctcctcgacgtcgaccgtcagcatcgtaaagccggcccgctgcaggagcgacgagacgtccttggggtctggtgggcgccgttaggatgcgcgaggtcagagttggtgaagaggactgtgcaattgtgccccaatcgcaagatactggcaagcaacgcgtactgaccgaccatgggcgagatgtgcgcgccgatgccacccgtgcgctcttggtccgccagctgcagcgacgtccgtagctcaaagagcgtctcgccgccgatcatggcgccgaggaagaatccgttcgggcggagcgagcgctgaatttgcgagagcacgcctgagggtcgcgacaaggagtcagctgccgttgctggctgaccgtcaggagaggctctgaatgtaccaggcaggtcgttgacccaatggaggcccatgacactaacgacagcgtctttcgagccttcctcgacgtgctcgagcagcttctcctcgtcgtgcgcgatgcgctttatcggcactgtcaggagcagggcggcgtcaaaagggcaaatcgatgagacgaggtctgcgaggcttgacgcaccctcaaagacatcgtccgcgtcccgtcgaagggccgactctgtagcagtcgaaaagaggacgtctatcagcctcaagcaattatgaacgggccctgcggcgggaggcccatgtggcgagccttgcaattgtcatcggctgcgctgcgactgctccgcctcgcacatcagctgaggcgcgtctgcctgagtcccttccactgtggccgctcaagatgcgaaggagaactgacgactccactccatcacctcgaccgacgcaatccggtccgggtcgtcggcgatcagtcgggcaaacgtgccagggccagcggtgatctcgagcaggtcgagcggccgcggcggcgcatcgggatcggtgggatcggaaggcgggggcttgacgtcctggaaggataagggccggcaagcatgtctcgtcgtcagcttgctggtcttgtcactcagagcggtagcttctctgggggagctgcaggaggtgcaaggcttcagacggacctcgaagcgctccatgacccgctcgccgatttcctcgcgcaggtagccgaccgttcgactccgctcgccgccgtccttggcgtacgcgagctcccgatggtggaggacattgtcacgatcaaagaccttgtaggtacctgtcggagggagcgagcgggatgaggaggacgacgagcgtcgggcggttgagctcgagagggcgaggagggacgggctcgggcgggcgagggcgccacgggatcgggcgagggcaagccgaagcgatggtcgtgacatcctggtcgatgtaatcaggtccgagagtagatgtagggcgatgggacgataggagggacggggcagcgatgaaggttgggtgggggacgcctcgatcaagcggcgacgacgacttcagccggcgccggcagccctggagctcgcacagagagcctgacgatgtaggcaaggacgccggtcaccgagccctcggtcaagcagatcctgaaagtcagcggagctgtcccttcgagacgatctcctaatgacctcaactggactgcgaggcatgggctcacgagtcgatgccaggctaggcttcaggccggcgagctgcgatagttggaagggaagcacaacaggcagcgtcgtcgggtgcggaacctcggcactttcatctcaccactatgcagtctctccttgctctgctcttcgccgcacgatgacctcgatctccacgcacgagtaagcgcacgtcggagactgtcgcccagcaggccctacgtctgctctgcagcccgcctgcgagcccgcccgcgcgcagcaacggcagcaagcgaccagcgcctcgaccggcgagcttgaccttcattgtatgctatgccgaccacgacctggcaggcagtgagtcgatttcgagcaggcttgagtaagaagtgcgtccagctcactcgtccgctgctgcgagacggcaacctggacgtctggcgtcgtcatgccctctctctctccttgcccgcggccgacgtcggccgggcgtttgagttgccggctacttcgcccctttgagtcgacctcgccgcctgcccttcctctcgttcaacgctcactcactcccctctccgtcgctcagcaccgttgcccttctagccctcacaagcatggtctctgccagcattcagtccaagggacgacgcgtcctctcgatcggtaatcccgttctccatccccccagttgcaatggatcgccgctcgcacggcccaggcgacgtcctgataagagctgatgagacgacgctccttcctcaggcaagcctgcctccccaaaggctcagagagagctcgaccagcttgtcaacgtcggcctcggtgcgtcctgctcgacggtcgagctctctctcgcccctgacgtgacccgcatgggctgctcaagctgaccccgcgttctaccccggacctgccttcctccagagcttgtctacacgcctgaggacatcaccgagcggtccgtgctcctggcatggatcgcggccgagatggcggcgaacggcggcttcgaggctctccgtgcgttcagggcagcaaggacgggctcttgatgcgcgttccactagctgctgaccgccatcgtccttgtcccgtcttttcagtcttcaccatcgcaaaggtctacaccttgctgccgaccgacgacaccttctttgggaccttcctcccgccccatgttcctaaaggtacgtcttgcagccgtggcccttcacggcagcaaggaagctctcactgaccctgccaatctcgcgcatgcaggcacgctgaagctggtaacgggcccgggtgccggctttgacaaggtcgatgtgccctacttcaacaagcaccgcattcggtattgcaacacgcccgggtcggtcgctgagccgacggcgatgcacacggtcatcctcgtcctgacgaccctccggcggacgacggcggctgagcggtcagtccggcgaggcgagtgggtcgcaggcggcgactcggtcgccaacaaggcgatgggcgtcacccaggtcggccggacggtcggtatcctcggcatgggaagcatcggccggatcgttagccgctacctctctaatttaggcatgcgtgtcatctaccacaaccggcgccgactgagcgaggaggcggcagagggcgccgagtatgtcgccgactttgacgaggtgcatcatgcatagcgccgcttgatcgcctcagatcgattgcgctgaccaacgcatccacgcccgactccagtttctgaagcagaccgacgtcctctcgatccacgtcccgctgacggaatcatcgcgcggcttgattggcgcacgtgagatcgctctcctcccgccgaaatcgtacctgatcaacacggcaaggggtcccgttctcgacacgcaggcgctaatcgctgcgctcaagagcggccaccttgccggcgccggcctcgacgtctttgaccaggagacgtcggccgggatcgacccttggctgctggcgagcgacaaggtcactctgacgccgcactttgcgtgcaacatcacgagcatctacccaagcgtcgaatcggagcaggctgagaacctgcgtgcctgggccgttggcgagccggtcaacgtctgcaaccggtgggactaggccggggaagaacggcgacgacgacgttgtactgctagccacatagagatccgtcaccattgtatgccctctgcttgccgtttgcgcatgtgaccggtgacttgccttgagcaagacttatgagtcgtcgtttggctctcgctcgcgcgggcaggagattgccgcgagaactcaagcgagctgtctcttctctcgatccctcatcaactttctcgcccttcaagacgatggctgacgtcgagccgccgccaggcgatgcccttgtccggcctgccgcggccgacatcaagtgcgtcgtcgcagcgagagggagcccggcgtcgcccagctgaccactccccccgccggtctctgccgcacgcagacgcgcctggtcgagcctctttagcaaccccttgctctcgacagcctcgctcaagcgggccgcgctcgacggcctgcccgacgccgacgagctaagcctgaccgagatcgagaactggatgccgctgtgggtgtcttcggccgtcgcgcgagcttccggcggcaagggctgactctgagatgctcctcgtgctgctcagccggtcgctgcactggaagctctcgctctcgatcctgccatcgccggcgcctcagctgttctcaaccccacttcggacctcaagacaagcctatgacgacctgcgctttgcctacctccgttcgcccgacggccgctaccctgccgacatcagcgtcccgccatctcgctccggcgtaggcggacacgaccggtcgtcggctcaggcggccgcaccctctgactcgacgtccaatggagtcttcgaccctctcagcctcgaggacgagagcccctggaaaaagtactacaaggatctcgaggtcaagaaggagattcgcaaggacgtcgagcgaacgtacgtcgacgcgccttgcctgcgcgtccgatcgtacctcctgctgaccgtctctgatcgcacggcgtagcttcccggacgtcccatacttcaagacggaccacgctcgggtcatgctcacgaccattctcttcttgcactgcacactgcatccggacgtctcgtaccgccaggtctgtttaggccctttagagcgtctggacaacgtgctctaatctgaccttctaacatgactcgcgctccacctagggcatgcacgagctcgccgccgccatgctgctcgccgtcgagctcgactcgctcccttcagtcgccgacggatccacagtctcggccgccgatgccgtcctccacgagacgctgtcacgcgcccacgtcgagcacgacgcctacgcgctcttctcggcgctcatgcggaacggggcgcaggccttctatgcacaccacccagaatcagacgcacccggagtctcgcgctcgccgtccgcgcccgaggccaagcagccgatcatcaaggtctgcgactcgatgtgggagctgctcggccggatcgacccggcactcaagtccaagctcgacagcgagggcatcgagccgcagctctttggcatgtcagtctcattcccttagagtcaaagcgcgtctgataatcggttgcaggggcgctgacaagacttgttctgtcggtcgcagtcgatgggtccgacttctcttcacgagagagttcccgctgcccgtcgccatgtcgatctgggacgcacttctcgcgctcgatccgagcctgagcctatcgactcagctctgtatcacgttgctcctccgcatccgcaacctgcgtgcgtctgcgaccctccttcgagtctgtgcgcatggtctgacccacgtaccgcgtcacgtcacagtgctcgccggcgactattcggactgcttgacctcacttcttcgctaccccggccactcgcaagagtatccactcgaccccttgctgctcatccagcaggcgctcgacatcaaggaggcgccgacgccgacaaccggcgtccatctcatcatccagaacgctgacctccttggcatcccggcgcaggcgccagaagtcaagcagtcagcggcgctcgaccagcgtggaacatctcgcagggggcctccccacccgcagcaacctccgcaacacgcccagcagcggagtctgggcctcccggccagcttcaacctcaacattggcgcggcggtcgcggcggcgcagagttctggcctcggcgagttagccaaagggctggctatcaaggggcgggagatgggagaaaaggccctccgggagcaggtctcccagatgcgggtgagcctctccctgggcctgcgttcaacacatcagaacctaaccttccttttccctgtctcgttgcctgcagcgcaacctgccagacttcccaacgtctccggtcagctccagctttctctcgccccgaccggctggcatggttgaatttccttcaccagtctctccatcagcaactgcgctcgaggccgaggttgcctccctcaaggccaaaatgtggacgctcggcgcagcgctcgatcgctgcctgacgactctcgacacggtccagctcgccctacctcagctgccgccgacgccctctggcgagcctggcctggacgagaagatggcacgggccctcgtcggcgtccagatcgttcgcgacgcgctgggcgaccccgagaggccatttgatcagggccttctgcgcgagatcctcgcttccacggccggaggtagcatggacgaccctttcgtcgaaggcgagacggagccaacgagccccgtcttcacgccgatcgtctcaccctcccctgtccatcaatcaccctacattccgccccagccaccgtcaccatcagcctcaccaccacccgagctgcctcctccgacgacatcgactcatgtcttcggaagcctgactggacgcactgtcccagacagcgagggcgtagccctgccaaacctcgcccacagctcagacagactgccagccgggccgctgccgccgcctctgccaccgcctccgcccccacccccacctccttcccaggggattgaccaaatgggggatggctaagagatatgcagcaaaaagggggcgaagaaaggggggtaatgaggtgacaggacggtgggtaggcgtgtgttggttgcggtcctttgtgaagcaaggcggtggggagtagcagcaggcatatagcgggagaagctggtggtacaaggacgggtgagaggcgaacgaaaagggcgacctcaattgatccggaggctcgagagcgagagctcatcggcgtcgccgcgctgggccgagctgtaaagcgcttctcgagggtacgggttggctccgccggcggccgacgtcgtcggcggcgactgagctgtagacgatccgactccgggaggcggcggcggcacgcgcgccgaggagccatagttggcccggtgggcggcgaacgagctcgacgacgacagatcgaggctctgggcacgatgcgaggctgaccgggcggcgccgacctctttgagcttagccgccagcagagggtccgagccgcgcttgagggcgtcgtcgacggcgcgcgtcgagcgcacgggcgacgaaggcgcggccggagtcggaatcgagcccgagagcgaggggtgttggccgtgcccgcgagcatgctggccctggtggtagctctgccgagcaggcgccggagggtgctgcaagaggcaaaaaagaaagtcgtcagtaagatgcacgagcagcgctttgacgagtcaaagagcacacaccatcgtgtgcgagggcatccacagctccgagacacgctgccggtggccaaaaccgccggcccctgagccgttcggagctgggcctccgacgggcgcatcctggccgaaggggcctcctccggacgctccgttgccattgaccgcaccgcgaccggcgccggcggcgtatgctgtcccggcgagcggagggaaggcctgcgagtggccgttgccgtccgttaggccgccgttggggatcggcgagggcgggccttgttgcgaggcggcagtagaatctgggtagtaccctccgtggttgaagagcgccttgacgttctgcgttgacggcgccggtcggggctgccgctgaagcaggctctcgccctggccatcgtgctccgactcgcctggggggaaaggagcagcaatgaggcggcacgtcagcagccgtcaaaggcccacccgagcgaaacaggcgcaaggtcgacgcaccgacggcgagcttggacggcaggagggccgagttgaagtgcgaaaaggcgtcggcgccgtacgaatcgccccagccgcgggcgttcgtatggtagacgccgaccttgcgcgagattaggtactcctcgagcgcgtccttggccgagccgagaaagtcgatgttagaccgctggcagtgaaacttgaagagcgagtcatcaccctggctgaagcgtgtcggcgcgacgatggcaatctggaggtcgcgcttgaggcgctcgacgagctggacatagtcgtgcgtcgcgacgacggcggcaatgtcgggcgcgtagggcacgtggaggtcggcctcgaacgggacgtggtcgagcagcattgcggccgcaatatggacctgcgactcgggcccaaagatggtgacaatgtcggaggccgtctccttgttggggaagcggacggtcgagttggtcttgccctcgatgtcgtggatgaagatcgacttttcgccgagcagcgtccgatggtagcgccgcgggatcgaaaccgtctcgagtgtgtagtccttgtcctgcggggaagaaaaacatcaggtcattgctcggaggctcataccgaagagcgcgcacggactttagggttgaccatctccatcaccgactgcttgagctgctcgagcgccattgcattcttggccggtgtccgggcgacgacattgtcctcattgtcagtgtagccgccgagctgcgcgtactcttcagcgtttgaaaacttgacgtagacgccaaacttcttcatgatctggcggcgaacaaagaagggacggtcagcagccgctcgcccgacgcgcaagaggtcggccgcaccttctgaatattttttccgccgacgccgatgatgcgcttgtggtagctctcgggcacgtggaagctgacctcggccgggagctcctcctgaagcatcttgaggccctcaagcgcagagtcgtcacttccgccgccaatgtcgatgagaaagttgtagtcattgaacgtctcgaacttgatcttgacgttggcgagcttcataatcttgttgaccttgccattctttttgcccgagatgaaatcgcggtgctcggacgcgagctcgatctggaagcgaatctcattgtgaaacatctgtggcgagcaaaaaggacagcgattagctcccacgctggccgcctctgccagcaagcccgcgcaccttgacaatttcgaggtcgagcaccatggcgacagcctccctgacttggccctcgaggccgtggatctcgaagcacatactcttgaagacaagctcggtgccggtatgattggcgatccgctgaagcgaaggctggatctgggccgggttgaccgtcgacgacgggatgaggacgtcaaatgtgatcggcaggagccagattgaggcgacgtagaattgacaagcctggcaaggaggggtcaaaggcaacaagcggtcagctctgaggccctgagcgctaagcacgggaggaagacgaacgagcgacatgatgctccggatggtgcgttcaatgttggcgcgctgatcgccgtagacagtgatgaggcttccctggctgccgagcaaggggaacgagatgtaagtcccgttgtcgaccatggccgccttgatgtcctcgagccggtctgtcagcagccaatcgagcttgcgcgggagaatcggcgtgtcacgcgagatgaccgacttggtctgtttcggcagcgcaagcaggtcgtcagctgggagctccagtcacatttagcaagacgcaagcgaacgcacccgaatcttgtgcccggcaatctggtcgagcatgccacgcgcccgctggacgcccagaaactgaccggtgatccagatctggtcaagcgtcggattgtgctgcggatgcggcggctggtggtgaggatagtggtggccgagcatcatctgcggcacaggcgatggcggcggcaagggcgagttcggtcggagttggtgaggcgagggcgagaggccgccccgaccgtggactccgaacggcgacggaggcgggtgcagcgggtgcccgaggttgccgccgccgccgtaaggcgggccaggaggcggaccgccgcggtgaggctgcgcgccatacgggttgggcgagtgcggcgagtgcggcggcggccagggctgttggctcgcgtgcgggtggtgctggaagggcgagggtgggtgctgcatgtgcggcgagtgaggaaacggactcatcggcgagtgcggcggcggaccagggtagccaccgccgtagccttgcggcggcgggccaccaaactgggggctcggaggcggcggggccatgcctcctaagccacccatcggcggcggagggggcatgaaggccggcgggctcggcggggtgatgccgcagagcggtgtcggaaagtagatgttggtcccggtctcctcctggatcgtctggatgacatgccgcttgcggctcgcaatgatcggatgtagcttgtagtcgatcgagcacgactcggcgtgcaggccgatctacgagagggtcagaggggtaggatcagcaagacgacgacggcgtagggaagggccggcaagagtcgagaaacgcacgagctcgtcgagcatcacaaggagctggactttggctacctcgatggcaccgagcgggccctcgacgaggatctcgcacacgcgctccgtctcgagcccgaaagcgcccttggccgcctgcgcactgctcccaggaaggaccggcgcaccgaccgcaccggcgtctccagctccagcgctaccgccaatgtttgacggtcctgccccgccgtgctcgcctccggccggtgcgggcgactcagggttgacgacgctcaagacggcgcccgtctggagggcgatcgaatcgagcttgtgccggacgggtgccttaagcgcgcacgaatgcgccgagagcggattgtcgaggatctcggaccgagcgaccttaagccgcgtttggtactgcagcgaggagcgaatcgtgtcaacatatccgcacgaggagggacgacggtgaagctcgaagggcggaccttcttgggcgcgttgcgcatgacggcccctcgggcgctcatcacctgggcatagttgccgctgagcagccagttccagcccttcccgacaccgccgttccctagcccgtccggatcaggcgcgacgctgacgaggcagccctcgcgcgatccgatctcgagcgcgagcgaatggagccggtctgacggcgtcgggccgtcggtcgccgactgaggagtatgcggcgaggccgagggcgagtgcgaaggggacgaagggttcgtcggcagggctggaggtagcggtggcagcggcggggccgccagaaggaacgacgtcgtgtagaggtccatcgccagttgagcttgacgagcagctgaggctgtctcgagtgcagacgcgtcgcccgggtggagagctggaaggtcggccgaccttaaagagcgagccggctgattgacgaagagcgcgaattcagcgaggagcaggctctggtgagagaacggcctgtccttgaaggtagggccctggctttgcgagggtcggctcggatagagagggaagcggcggcggcggcgagccggaggaacgaggcgtcgtcgcccttgggctgaggccggcgacgagggcggggggcctcgccggaagctggcgggtagcggtcacttgaagggggtatagggcggccttgctgtcgagaaggaggacagctgcgtagagtatccgagagcgagcgagcgagagacggagtgacggagtgacggagtgaaggctgtggttgtaggtgcggctgcaggagcaggttcgatctgtcgcggcacgactcatgggacgggaggaaatctgagaggccagcctcgagtctgcccttcgctgcctctcgtcgtcttggaatgcactactctcgcggaacggtttgcagaatatatttgagctgcctgtccacctcgacagggcggtgccgtctgcacggtctgtcgccccggcccgtttcctgatcgacagcgcgcagcagctgttgtgcattcaatccctctatgcgagtcgacacagtactccaagccctaggcttaggcgtggaaggtaacctcccagaccttggcgcagccatctgcaccggccgagacgagccgggttggcgacagccactcgacgccggcgaccgaagaggcgtgggcgttctgacggcaagaagaagagcgaacatcagtgacggacgaccagccggcgcaaagacggacggcacctaccggaatcttgatgttgcgcatcggccgggcgacgctccagacaaagacgttggtgtcgaggctcgacgacgcgcaatactggccatcgactgaccagcgaagggcggtgatccggcccgtgtgtgacgcccagcgacccgagattttgaccgacttggccgcgacgtcgaagacctgtatcttgccgccggactcgcccgcggcgagcaggctgccgtccgggctgaaggcgagcgcgtagactggattgcgtgagtccttgaactcaacctcgggcgcgtccgaaatcgacgccgacgacgagacggcgtagacgtggagcttgttggcctcgaagccaacggcgagcagagagcccgaggcggcctcgatgagtgcgacgctcaggacgcgctcgcccttgaacgtcttattggcgaccttctttccagcctggagcaggtcgaccgactcgcctgccgcgacagcaacgagctcttgcgagggcagcgaggcgatcgaggacggttgcgaaggcgtcgagacggtcgaggagctggcagtcgtcgtcagtttgggcgacaagcagggtgaggcagcaccggaaacgcacctgaagccggtcgagggcgagatctccttgacgctgtcgtcccaggcggccgtcgcgacaccgccgtccttgcgagcggcaaagccgacgatttggcccttgtggccctcgccgcggacgtcctcccaccaagcgtccttgcagtcgacaaacgacttgacgccgccgtcaaacgagcctgcccaaaatgtcggttcgcttgcatgagaaacgccgcaagcggtgatgcccctggtcgggccgtagaggtacgaggtctggtcgggcgcgcgcgagtcgagcaggttgatgacgccagacagcgagactgaggccagcgtcgacggcgtcaggtaggtgacgccgagctgctgcgaggaggttgcgtcggagccagatgcgaggttgaacgaggttgtcggcgcgagcgaggcggcgtcgtacagctgcacgacagagttggcggacgaggtcgcgagcgactcggagtcgggtgagaacgagagcgagtactgccatttgatgacgaaacacgatcagctggatcggccgcagacctcctcggcgataaggacgacgtacgagcgagcccgacgacttgtcgccggctgacgccttggtctcgccctcagcgccgtcgtaaagaaagactttgccgtcaccgccgaccgaggcgagcaggtcgccgtcggggctgaaggcgaggtcgttgataaaggacgtgtggctcttgagcgtcttgctgtacttgaaggggacgccagtcatgaacgagatgacgccgtcgtcgccgccggtcgccgcccggaacggccgcttgctccggatggcgacggcattgaccgcctttgagtggccgatgatctcaccacatgcactgccgccctcgagcatgagcgcccgcccaaagctctcgcggccctcgccgacgacgatcagccgctttgactcgccgtcccaggcgacgtcgttgacgcggccgccgagcgcgcccttggtctcgagcttgacaatctggtccgtgcctgcgacgtcccaaacgcgaagcgtgccagctgcatcggccgaggcgcagtagtagcccgagggagagaggtgggcgactgtcggagcagcgaggtgtgccgtgtggacgatcgaggccgagaggttctgcggagggatgggcgaacgtcaggggtgctgcgggcgaagtcggttgtggctgcagctcgccgtgtgcacgtacacggatgtcgcggatctgttggcgagtaaagggggagctcggtcagcttggcttctccccgctgaatagagacggcaggaagggagagaaggtcgcggtgacgagtgagggactgacgacgacggccttgtcgttggtgtagacgagcttctcgccgcccgcgtctgacgagatcttgcaagcccggcctctgaacgaccgatcgagcgaggcttgggtcaggtctgaagtctgagtttgccagacctaggaggcccagccaaagccgaccggctgatgtctggacagccttctaggctgggaggccgctgctcgccatctcgcgctcggccggctagcgagcaggaggacgtacctcgtcacaagcgggtttggcgggtagacggcggtgcgtgtggccgacatggtgcgactctaagctggtgagagatagagcaatgagatagagcgggcttcgagggaagaagcagagaggctgatggttcggggggagggtaggagagacgacgcgcttgctctctcgcgtctcgtcggggcagagggtgtgcgcgcagcaccccgcgccgacaatctcgcttgcccttccatcgtctgccaaggcagcgtcaacagggaagcaagtaggaagaaggtcatgagatttggtcgtcgtcaggggagcagaagagctggagactgaaacagaaaaaaggggggggggcgcatcaagggcgctaggaggaagcaacaagggtcggccgggatgcggttctacaagaatgtacgagaaagcgggcaggacgtgtttacaagaagggggcgaggggaaagattacgccctagagaggactttgagccgggtgagcgagtagatggcgcaaagagggttggagaggggctgggccgcgaggcccggagacgagggtggagtggagagccactcgacgttgggtaccgtcttgatggcgagcaaacacggggtcgctcttgcgtctccggcactaggccctccggacggagcctcttgccctcgtcaatttagatcttgaagctaaaggagacacgggtcgcactcttgacgccgccgctgttgctcttcgaaatcgaagagcgccgtgcgaggcgatcagatgatttggagccctcatcgtcaccgtctgcgccggtgtcatcgtcgtgcgaagccgcagctggaacgatcgcctgcgacgagacgtcgtcagaggctgaggccgagagcgagcggaacaggtttgcgttcacgaacgacgaatctggcgcgttgctctggtgcaggacgtccgggagctcagctaaggcgagagaagggtaaaggcgatcagtaacaagctgacgagaagagggtggggtggtgagagggcgggcccacgaagtgagaagtacgagagtacgcgtttgagcgagagcgcgccgggcgtcgccggctgggggtcgctctcgaggagagtgtcggtaaagccaaacgacgtctcgagcatcggcgacccgaccagctcggcatcgtcatataagctcagctggtcacagccgtccgtggtggtagccgagggcaggcggacgagtagagtggggtggcagagggcgggggcaacttgcgtcggcgaggcgagctcgtcctcgtcgtcggtcgtcgtctcgttcgcctcgtccgagtctgaatcgtgacgggcgaaatcgagccagccccagtcggtcgtcttgcagctggtacccgtgacgccggcgaaagagcagaagccgtcgaggttgaaggcgttgcgcccctcgatccgttggggagggcgctgcgcggccgccgtcgtcgtcgtcgtcgtcggggctgagaggtgggcatcaccttcggccggagtcgatgggaaaaaggcggcgagcgcggtcgtcggagggaagagcgctgagtaggaaggcggtcgtgggagcgtcatctctcagggactgttggggaggcgggtggcggtatggcgagcgagatggtcgagccaagctagcgcttcggaggcaaggtcgtgctcgagagcccaagcgggtcccaaaaagcactccagaaacgcccaggaggggctatgactgggctctgccccgactgaacgtcaagagtagcaggatgtctagaaagcagcacctgcccacgccgcgatgaaggaccaagacattcatgtctgcagcagagacgccgtcgcagctgtcatggcgagtcgttcagcgacaacgggcgacgacgcgcgcgcgcgcagctcgcccctccgaagccgctcctcggccccgtcgctccgacctcgaccagcgacgacgactcccttgccgacccgcccgccatggccctcccgctcgcctctccctccctcatccggcttccgccagggacgcctcgcggtcacgccactcgcacgccgtcttacgcgctccgagccctgcgcacgccaggcggcgagcccggcagcccggtcagcagttggacgtcgggcgagcgaccgaatccgttcgacgacgtccgaccgccgcagggcaagcgctcctcgtcgcgtaacagagcgagtgaggggtcaggtagaggcgatgagggggacgacgccgacgatcacgccggctcggatgaggagctcgtcgacgccgagggcgaggacgaggtcaagcacgagccgctcgaacgtgccatcaacctcgtcggcatgggtgcgcgcctcgtcgacgagtcgttcaggcgctcaggctgacattcattctcgcgttgtcttgactaggtgcctaccgtgcgtccctctctggcccgaggcgcatccgccttgattgccgcggctgctgacgtgcacgcctcccggctccggatgctacctctcttggctactcacagaatggcgcctgctggtccgtcgtctctcgtccaaaggtcatccgagcagcgtagactgatcctgcctttaccactcctcctcctcttattcgcaggtcctctgcggcttcgggtggtacgtcatggcattggtttgacacgagcgcagctagtcgccaacgcggcaactggacgcgccgagctgacctcccccgtgattttctttcaccaggctctgcgacaacatgtacctgcaggtatgaggcgccttctcgatggctttcctttgggcagatactgacgtgccccctgcctacccagtgcatcgccgtcatcctccctcgcgtccaggaccactttggcacgccttcgagcgagattggcaccctgacgagcgcaaccatgctcggcatgatgctcggcgccgtcttctggggagcgcttgccgacctccacggccgaagagttgccttccgggcgacgctcggcgcaacggccgtctttgggcttggtgagcaacgtcggctgctgccagacttccgccgaagatgctgattgtatccctctccaggctgctcgtggtccggctcgttcagcatgctccggctcggcctcttttttctcggctttaatgtcggcggctcaatgccgagtgtgtctgcatctcgtgtcgaaaacgaaggcactcgctgatcagaagctcgcccacagccgacgggaccattctcctcgagaacctgccgcgtaacaggcagtatctcctgacattcctgaggttcatctcgaccgcaacttgcgctgacaggggttacacgcattgactgacccgccgtttcaatgacctcgcagcaccttcttctccctcggagccatcacctcctccctgatgggtctcgtcatcctgccgaccggctcatgtccagagaacgtcgctgaggttgatcggaccgagggctggtgcggcgaccttgagctcgagaactggggttggcggtggatgctccgccttcaaggcgctcttgtgcgtgccctcttgctggccttgcacgcggcacgacggagaggctgacagcctgcgcccccttcagacggtcgcattttttcttgcccggctcaccgtcttccgcatcaaagaggctcctcgcttcctcgccgccgctggtcggccggaagaggcggccgaggccctccgctacatcgccgctttcaacggcgtcccaaccggtcgcctcgagaaggagctcgatacctaccttttggcggcggcgcgagccagtcagtcacaggacgaggacggggaggtagacgaggaggatcacagcccgacacctcctgcgccctcgcgcccagctctgcaacaggatgttgtcacgtcttacgcctcgactgcctcgacctcgccggaggagcgaccgcgctttccctttacaaccccgagccgagaagaccggcagtccttcatggacggcttacgccaggcggcggatgctccaacgctcccgctaagacttccatcctcggcgaccacgccagatgacgtcgaggatcaagtcgggtcagctatcaggcgaccgccggccccgcgacgcgtcggatcgcggtcaccgctgcgtgcgacagcgccggtgtcgcgcatgccgtcgatcggccagctgaggaagaagacgatagcgagcctcgccgagggcaaaggtaagctgctcgagatctttcgccccgagtggcggcggacgacgatcctcatctgggtcatatggagctgcttgtcgatggcgtacaccagtgcgttcccgtctgctgcagtcttgcggtccccgccgcctctgctaaaatacctgcctggcccggccagtgttcaacgcattcttgccgacaattctcgaggcacggatcgagcccaaccccgatggctctggcggcgggcggaaagaggccctccaggaatacctgatttacacggttgccggcgcgcctggctccctcgttcgtcccgcagcatcgcgaagatcgaggccgagccgctgaactcttgatgtctgccactgcagctcggcgcctacctcatcgaaacctcttttggccggcgcaagactctgacaggcacgacacttgtcaccgcgctcgccatgtttctcttctcggccgtttcgtcgaagactggcgtcgttgggagctcaatggcgatatcgctcgcttcgacggcaatgtagtgcgtctctcgcgcattctgcctcgcaagtgcccgcagctgattgacttgcgccctctttgcagcgccgttctctatggaatgacgcccgaaatcttttcgaccgagattcgcgggacggcctgcggctcggcggcggcaacctctcgactgtcagtccttcagccctgttgccatcacgacatgtactgaccacctcccctgtcccgcagcgccggcatcgttgccccgctcattactggctccctcctcgccatctcgccgtcactcccgctctggacgtcggcgggcttcttccttgccagcgtcggggcaaccgtcctgctgccattcgagcgcgcggaggacgtcgagcgatcatcgggcacgggcgactatcgcaagctcgagacggacacgtcgtgaggcctcgcaattgtataatcattctagccatcgcgagggcgttctcgttatgaagaaaaagggcatcaagcagggcaatagggctacattgggcaggcaagtcgtcgaagagggtcgttcgtggcgtaaagcaagagatgtggcgaggcaagatagagaggggtcgagatgcgcgagagcgagcggggcgtcacgcgtcgggcggcagctcggacgagggcgagacgatggtcggatcagctgtcgctggcctgcctcctttggccgagagaagcgaagacgctaaggcgaccttgctctccgagagggtgcctcccggggcggggtagtcgagcggcagaccgttgctaccccgccggctgccgtcggtgctcagcgggttggtgacggtcgcgatcgacggcgacgaagcgatggacgacgccgtgtcggtcgaatcggtcgacgtcgtgctcgagcgccgcaattgatcgatggggaaaatgtagagccgaacgaggttaatgagatcctgctgccggagcggcttcgagaggtagtcgtccattccagacgaaatgcagagcgcgcgggccgtcgtctggacgtcggcgctgagccccacgattggaagccggatcgagtgacccttgcgactctcgagcacgcggatacgtgctgcagcgctcgggccagagttgttgacgccgggcatgtggctacagggcagagaagggcgggcaggcgaacgtcagcggcggcagttccaatcttgagcgcaaaatgcgacaggacagactggtcaaagagggcgagggcaaagtggccttcgggctgggcggcccactcattgacggcgtcaccgccccttgtcgtcgccgtcaccgtgatgttgacccttccgagcgtcttgacaagcaggcgggcggcaatctcattgtcctcggcgatgaggactgaggtccgagcgaggatctccttctcggcctcggtaaagtgatcgatcgtccgggtagggacgacagacgtcgtgatggccttgacgtgctcgtccgtcgacggagtacgctggagacgggacgccagctggacggccatctcgagcagcttccgccgacgaagagggtggtaaaggaccgagacgccctcgagggcttcgatgcgcgacttcagggactcgaccgagggcgccagcaagcgaatgacgtttgggagccgtttggaagggtcagagtaagccctgagcgcgtcaagcgcctccgacgattgtccgtcgatgatgtaaagctcgtacggctcgacggccgccttcagccgctcgacgaaagcggcaaccgagtcgacggtcgtcacatgagagccagcaaaggcattgacgacggatgaggtcgtcgtcggcgaggtcgacgcgacgaggatcgagaggggcgtgggagtgttgatctggcgcagcagcttccgcatcgccttggcggcctggaggaaagggtcgtcgccaatgtcagcctttggcgcagagtccgaggcacgcgctacgcaccttggcgtttgccactgggtcgagcttgcaagggatgtcgaaccagaaggtggagccgaccgccggctctgagcgcaggccaatcttaccgccgaagagcttgacgagctggaggcagattgacaagccgagaccggttccgccgaaccgccgggtggtactgccgtcagtctggtggaagggcgtgaagagcttcttctgctcgtcggccgtcatgccaatgcctgagggcgggggtagtctcgtcagccctcggtgagaagacgcgacgatggaaatgggcgcgacggaccggtgtcggtcacctcggcacggatcgctatctcgccgtccttaagctcgagcgttccaggcggcgagggagcaatcgtcaggcggaccgagccgctctggctgaacttgattgagttgcccagaacgttcatcctgcaaggcgaacgttgaagaggtcagcggggggcgggttcagagaaagaggggcacagcgagcaacaaacaggatctgccgaacgcgaggtgcatccgagttgacgacgagcggcacgtcggggtgaactagcatgggagagacggtcagcgtcgcgcgggatcggcagcagcaaagggcccgacatactgttgtacgagagctcaaggcccttgccgacggcgagcggcgtgagcagctcaaggcaatcggcgacagcgtcctcggttggcgccgatgagtagaacagcttaagctggccggcctcgagtttcgagtagtcgagcagcgagtcgatgatatcgagcaggagctcgcatgacgagcgcgccgtctggacaaagtcctgctgctcctgatcgagtggcgtctcggccagtaaaccgaggaggccaaagcaggcagaaagcggcgtccgcagctcgtggctctgcggaaggaacacttcgggattagccttggaggccggggtggcgtgcaacaaaacgagcgaccaaccatcgtcgcgaggaacgtcgacttgacgcgagacaggttgacggcctcttccctggccgctcgcgcctcggcaagcaacttgctctgcgacgcgacagacttgatgttcgctctcgaggcagcctacaggacaaagcggcttcagtgtctcgcccaagtgcttcccatctcgtctgacgcacctgcagattgcggaacagctggttgttgcccagggcgatgcaggcctgcgaggccaggacggcgaggacagcgagcttcgcaggcgtaaagtcgttcgtccggcggctggcaacgtagatggcgccgatcgaccggccgcggatggagatgggcaagcaaataacggatcgcatctcgctcacgacgtgcgagaagcgtgggtcgcgcgacgcgtcgctcagcagcagcttctcgtgtgaggcgatcactgccggcaagcacacatcggtggtgagctggcagtcaagatggtgatcagagggcgaggcggcgcaccgtgggtggcaatcgcaagaagggcggggtcctcagcatcgaccagctgagagggcgactcgtgaacggtgaccgcttgcgtcggcgaagccgaggtcgcaatgatatgctggccgtcgtcgttgcggagaatgatcgaggcctcttgggcgtgcgtgcagttctggacgaggtgcgtgagcgactcgagggagcttgcgacgttaacgtcggcgccgattgtaagcgagccgcggatgatcgtctgaaagtcggctagcgagagattcttgtagtcctcgagaccctcgctcgcctctccagccaaggtcgcggcatcggcagcgtcttcgtcgtccgagtcgacagcctgctcgtcgggcaagccaaagtcggtctggacagcggcatcgacccgggtatgccgtcgcgggccggcgtgccggaactggagcgacatgtagtcggcgaccgcgctcgctccccagctggcatgggtctcgacggcgcgctgctggagctcggtgccgaggtggacggcgccaacctgggtaagatgcgcgccggcgagaaagtagcaccagccgaggtcgctcgtccagccaccctcctcggcgcgattcgtcgccatgtcgtacaggccaaaggccgtcggcaggccgtcgagcgcggccatctcggcctggatgagcagcgaccagtgctcgtagctctcggtcgcatgcgatgcccactcgtcgacgtacgcctggttgagcgcgatctgggcacggtaccgcttgcggtcttcagccggcagatcaccacgacggagctggctaatgagggcgagcgagtgaatgtaggctgctcggcgagcgtggtaatggccttcagcgtaggactgatgcggccaaaggtagaagccgagcgagacggcctcctcggtccaaccgagggcgtggagggcgacaatctgatagaggagttggccgttgtcagtgagggagcgacaggaacggctcagactagagttctttctcgccttaaacgcaaagtaccagtagagcgtgacgcccgaggcctcgtcctcttgcggcaggtcgcgctcctcgacaaagtcgtcggtgtcgaggatcgtcagcgacgtcacgttgaccgtctcgccggcgagcgccttgatcgtgttggccgtgccgatcgccatcgtctcggccgcagtgccaggctgccagcgggcaatgtcgacaaggacgtcatcagcgagcgagacaccctctgagagaggcatcgagtcgagcagagcggcgccgagctcgtggagacggccgaacgaagcaaacgagagatcaccggccgagagcgagaagcgagtcgcagcctggaccgtctgccgggcctccttgagcggcgaggcgtacgcggcgagggcgatgctgagcgtcaaggtccggcccttggctgcggccgacgagagcgggtgctgggcgaggtcggccgcgaaatgggtcatctgcgaaccaaaggcgaggtcgccaaaggtcgaggaggcgacaaagccaaaccaaacaaagccgaggcaggcgctcggcgtcatgccatgcgtcagaacgagctcgacgagccggagcgcaaagacatccgtccgcccgccctgcgcccagaatgcggcgatcgtcgcctcggctaggaggtcggatgcgagcagggtgctctcgtctgtcaccggcttgaggtcgccgaccgagtcgccctggagcgagagcatgctcttgacaccggcataggccaggtcgcggtcctcgtcggtcgcgtcgagagcgacctcgacgccgaggcccgaaagtgcccggacgaggaggttgaagtgaccggcgtggtcctgctcggcaaacttgagtcgggcgtccttgaacatgatgcgggcctggagaacgggcgtgtcggccttttggtagaggtgtgtgattcgagcggtcgctgcctcgcggcggttgctgtagagctcgagcccgacgagggtcaactcgagctcaaacatctcggcccgctctgtcttccaagcgccagagaccgcgccgagctgctcgctggcggcgagcaggctgtaggctgactcggttgcgccctgcgtcagagcctcctggcctgccgcaaagagcgtctcagtgtaaacgaggtcgacgggtgatgtgcggagaaggagaggcatgcacccgagcaaaaggctggcggcctggaagcgcgatgcatccggatagccgaggaggatgtcgacgatctgcagagggttcgaagaggcgatcagcgacaggtcttcagccgtcagcagggtcaaagccgcaccttgagcatcatgccttcccgctccgtctcggccgtgtcggcgaagagcgagacggccgcgtgccggtagcgatcatggcggaagcggaagaagccgcggccctgagcggtgatccagccttccgagatggccgtctgggaggccgccatcgacagccgcgagagctgagcgaggtcgggcagctcctcgcccgacgaggcgtcgctcccgctcgactcttcggcgtccatcaggccgcagacgtcctgctggcggaaagtcgagccaaagagcgcggcccaaccaagaaagcgccggacggccctcggcagctgctgaaggtgcgcgagcaagaagccctggtcacagagtgcgtcggcgtccttgcgggcgagctcgggcaggaactgcgtctcgatcgtatggaggttgaatcgccaggtgttgctctggaaatcaaagtagatgtggttggcccgcttgagcgaggtgagaagctcgcggacgagcaagacgttgccgtgcgccgcccggtgcaagacctcgctcaagggcgccacatgggccggtgtgtcgtgcaaggcgtccgagacgaacgcaccgacggcctcaggcgtcaatgacggaaggctgacgtaagtcgaccgcgaaccctggccaaacgtctcgtgcgcgactgagagcgactcggtccggaccgtcgtgacgatcaacagccggatcttggccgccccgagcgagcgcaagagcgagagcgacgcctcgtcggcgaaatgcaggtcgtcgagggcgatcgtgatcggcttctgctgggcgaggacggcaaagacgtcgatgacgagggcgaggaagcgcgcccgcgtctgctcggccgtcgcgagcttttcgatgtcagagggcaacatccggacaccaaagagcgtcgtgatctccttcagctccgggatggcggcgtgcaggagttggacgttgcggagacatggcccaagcttgtcctttgacgcctgccagaagcgatgaaggtcggcccgcgagtcgagcaactggcggaagacggccgagagggtgccgaggattgtcgaatacggcgccgcagagccagctgggtcgaagcacaaacaaaagtcaacactccagctccaatcagagcagactccggccggacgcactctcaaatttggcaacgccaaaaaagccggctttgcggaagtcacgctggcactctgcgacgagagccgacttgcccgagccagccgggcccgagatgacgaccgtccgggcggccaatatccgttcgcgcccgcccttgcgtgcgtaagggcctcgaccgggcgggccggacgagctcgcaaaggaagaggtccgtaagctgcgcgtgctcgacgtcgccagactctcttcgagcagggggccgacgccgtcggccgagagcgagatggaacctgcccgagaagcgcgcgacgagctgccggcttccgagacgacgtcgccctgcgtctgctgaccgaacgactgcgggaggctcggcgcgatggacgacatgccgtcgaccgatgacgagttgacctgacggcgcggctgatactgggtagcgtgtgtattagcgacccggaagaggacgctgcggatcgtctcgagctccctctcgcggccgtagaccgccgaagggatgatgaagttcgagaaggagtcgcgggagccgagcagaaagcttgggacgagctcggcattcgaggacgcgtcgtggcctcggccgtccgtcagcttgaattgcgcctggagcaggtcccagccgagaccgcttgccgtccggtagcggtcgtcggggttctttgcgagcagcttatcgatgatggccgcgaggacgggcgggacgtcgggccggagctcggtcacccgacgtggcttccgcgacacaatcgagtgcaggacctcggtgcagtggctccaggggatctgacccgtaaggagggcgaggaaggtcgcgccgaggccgtagaggtcggtccgatggtcgacggcaaagctgctgaggcccgtctgctccggcgcgacaaaggcgacggcctcgcgcacgagcatgctctcctcgcgccgcgcctcgctgttgagcgtgtcgagcgggaccgagcggtggcccatgtgggcaaaacggaccgagccggtctggacgttgaagtggaaagccgacggccgaatctcgaggtgcgtcgccccgcgggcatgcaagctctcgacgcactgcgtcgcctggaccgcgaactctagaaacgtcgcgagatccatttcagtcaggtcgtggatctcatcgtcgggcgctacctcgacggccgggctcgatagcggtgttgtctcggcgctgccttcatacgtcggccccgtctcgggcgtcggcgtcgcgtcctcgcccgcgctccttcctagcgaccgaggcgccatgccgccgacgctgtcgtcgtcgacactccggccaccgtcaccggtgcttagcatggccgggcaaagaaatgtcggcgagaagagacttgggtaaaaggccgggagcgagttggcctagaggaagtaaaagagggacggttgagcttctcgccgcgccgactggattcgtcgccagagggacgcacgcctgggtgctgaacgatgagcacgacgacgtcaccctgctcgggcggaatgatgaagctgaaggcgggcggttgcgagtgttagccgaggactgccgaacaccggcccggcccagacacgcacaagtcgacgagcctcagagctcgctcagacgattcgagcgagccggcgagctttgagatgagcaggagctcgcgctcgagcaccatcccggcagctgagcgggcggcagcgacctttgcgatgaccgaccgcttgtctggaaggtaaagggaggaactctggctcggtcagctcgcgttgtgacaggggggcgaagggcgacgtgacgggcgacagaccctcgaggttcgtgcccgtcgcgagccaggttctgaggggcagacagcgttggatcaacctgatgcgagacacacaagcgggacagctcggagacgtacgaggtccctactgactcccagcgtcgaggcgagtcgaaccggaatctcgggacacacagctcgtacacctctgccacgccagcaccagcggtcggcgccggccgccaggtgaggcccgggaggtagagcgccgcccgcttgttcttcatcggccagccgagagcgtgccctttgcgagagcggtagtcgcagcgagtggatgcgaaaggtggaggcggcggcgggctggcgagctgctgaaggccgcagaggaggtcgggtcggcctcggttaagcagaaagcagacgtcgggccgagcgttcgcaacaaagggagcggcgaggaggtgctgctgccgtctgtaataggagatcgagcggcgggtcgatcaaaccgtgcagctggtcgctctgttgtcgttgtcgctgcctctcgtccgttcgggctgactagtccgtgtgtgccgtcgctctcctccctctctgcgttcgtcgtcgcccacgcggcgcgcagcgggtttcgcctcggaacgcgggtctcctttgagccgccgcccgtcggcacctttgcccagctggcgcagatccctttgtcttcccttcttgcctcgaaacctgctgctgctgttaagcggcaggcttccatctcctgatctacaggtcagtcgacaaagagctttcgagccggcccagacggggggccgccctccggcgagttctcggtttctcttgctactctccccttcccgccgccgccgcgcccggtggagcccccctttttcgcgtggtcgagagtcgagagtttctcgatgaagcgcagcgcaggacttggccgcgtctcatcgtacgtgcagcaaggtcgtcgacgatgactgcaggacgggtcgggttgtcggcaagagacgctcgctcgtcccaacgagaattcggtaagatgcacacctctcgctctctgctaccggcagtgtcatcttatacggccttgctcttcttcttcttcggccggtcctcagcagtctcaccgccttccgcaacagccggggccggcattgccgcagcctcctcagccttgcgcttcttctccttcttggcagccttccgagcggccttgtcggcagcggccgagtcggtcgtaactttttcggcggctgaggcggcagacagggccgacgtcgacggctcgggtgcggcgggtactggcgtcggctctgatgtaggaaaagggaccgtcagtctgagcagatttgtgaaacgctaccgacagcgcaaggcagtacaacgcaccggcagacgcaggggcagcggcaacagcggccttcttagcctccttcgccgccttctttgcccgtttgcgctcctccttgctctctcccttgctctcctccgcctgaatgtcgacagcagcctccgtcgtcgagctggcagcaacaggctcgggcgccgagaccggtgtcggctcgggtgccgaaggaggtgcagcggccgtcgcagcctcagccttctgcttggcttggacggcggcgaacgcggcggcgtacgggtccttggccttctgcttctgtgagagcggcgacagacgatggcgagatggtagaagggccgacgcattgacgatgatgggcggggagcacagtcgcaaaggggcaaacgcgggatggggtggcagcggtcagcgagctgcgacgagcttcatgccgccctctagtctccttgttgtacacaccttcttcgccgggccttggtagagcgtgcgctcgtacttctcggcctcggtgatgcaggtcgtgtgacccctgcggaccgaaagcgcgctcttccagtcagctgctgcggctcgtcaggagcggcgcaggtaagaccgctgcggccaacggatgtcatgccaggtaggtgtgagcacgcacttccactcgcccggcgacctgaaggtcttgctgcagtcgaggcaggtaaaggacgcccggcagcgggacgagtgctggtcgagcttcggcttcttgacgacgtctgccgggcggaggtcgtcagcatggctcgtcggacgtgatgcgatgggcaagggacggaccagaacacgagtcgcactggaaggagaccattgcgggcaagtcaaagacagcgagagctggcttagtcgagagagagagagagcgttgaggggtcgggtgcgcagacagacgcgtagcagcgacggagggcttcggcgtcggccgccggacgaaaatcggcgtcgcgacgtgggaacctcacccgttcctcctcctcgactgagggagtatcaatgtgctaggctgcctccaagagagagggtatctataggcagagggtgcgagtgcaggaatgggccagcgattggggcaggtaatcgtgcggggaccgagatggggtataggcagatgtgaggtgcgaagggtgacagcgtgagagcgacgcgcgcgcgagacgaagaaataaggaggaggttgaaacgccaggatggctctacggcttcaaatctgcttcacgagcggaatgatgtcagtaaataactcgggggcactctaccgctgctcaacgcacttttgcccgatcgtctagggtgaggcgctcgaagtcgtttgccgcgtctccgggccctactaccgcgggagagtcgatttgatctgagggccgagatgagaccgcctttggcggagagacaagatcggcatgggctggcggcgtcgggagcgcctctggccggacctcgggcgacggggccgactctcgaaccgaacgattgagcacgcctggggcggaggggatggcgaggcctggcccattccgtgcaggactttgcgtcagaccgtcgatattggctggcagggccggtggcgtccaggtcccgtcctccctcggtcgacgagagggtgcgcggccgatgtcgatgacggcacccaggcgatcgtcgaggctgacgggcgcttcaaccggaagtcgactcgaaggagcggccgacgtcgaggttgaagcacgagcatccgagccgtgttgctcgggcttaacttgtgattgagggaggctgatgttgccgagacggccgcctgtaagattggcctggtcgaccgactgttctaaaggaggcgtcttgatcgattggcggcggccaaaggggttgaccgagaaaaacgatgtgagggtcgagcccgacttgcgtcgtgcggtcggcggcagcgacggcgctgatgacgacgtgccggatgacctggcagtgccgagtgctggaaggcgtggtgccaactctggcgccgaggcgagcttggtcgcaggcgccggagttgcaagcgcaacaagcacccagcgagggcccttggcgtcggtcaaaatggaagggtaaatctcaaaggcagcgacaatcggcaaggttgggtcggccgagttcggatcgagcagcttgtgggcaagcacggccgggaaggcctcggacatgttgctgtcagagagaaggcagacgtcagcgaaggagcaagaccactgcagcaaaagagtgagtagagcgaacagcagagagacgcccagcagttgagctcgcggcgcttcggcaggtcggtcgggcaacgcgtcaatctgctgcggaggcgacgctgcgtctgcgccttggagaatgcgctcgagctcgagagacctagcattgaggcgccgaggcggaccaccagcagatccaaggtcaagctcaagaccggcgccgagttcgagagctttcggctcgtgccgggcaggggacgacccgtcaaaaccgaacgaggagaaggctgcccagtcggtaccctctgggctcgactctgcgccagccgttgacatcgacggtacggcggcgacgacgggcaggtctggctgagtcggctgggatttgggcccgtcggtggatgctgggctgaagaaggtcgacgtggacttggggaacggcctatagataggctccgcttcctgcgacttgccggccgcgactagcacagggtcgagctctggcgccgacgggtgcagacgcgcgatccgacgggcgagccggatcgatccttccgcaaacacgttgttgagtgcgagcgttgtcgggtcgttccttgcctcgccgacgctaagctgaccgtgagactcgcgtccggcggttgcgaggaccttcagccaggtctcttgggcgccgagaccggctcgatccggtctgcgctcgccagcagccgctgaattgatggcccacgtacccagccggacggggtcgatccgtttggcgctcggtcgccgtacgccggtgtcttcctcgggcgcgacgatgacgacgacaagagcccgttcatgccgggctgtttgaagagccgcgcttgtcgacgtcgctgacgacgaagtctcggaaccagctctcgagccgaggtcgtcaatgccgagcgcgctgtgtgagagcggggtcggatgccgctcgatcagagaaaggagccgggtcgggagcgccacccctcgagcgacctgatcgcgtaggtaggcccgcacaatgtgctcgaactttgcgccagcagcctcgcaggcggcaaggagagcctcgactggggcggctgggcccttgcttgcctcggctttcgatggtgcagacgaccggaagaggctgaagccgacgagcctggcgagcgtcgggagaccgacaccagtcgtccggtcccaggcggcggcctcgctgaaggcctcggatagcgcctggaagagccgcttctcctcgccctccttggtcgcgtcggtccaagcggtcgacgcaaaaccgctcgcgcgttcagcctcgcagaaggcggcgtaccagcgctctctggcctgagaaggcgccagtcggccgacgacccagagcacgaggtgagcgagggctgtgctcgaaccgaagtagcggacctcctgttcgaggaggtaggcgggggaaggtgtaggcaggtcgagcgatggcgtcttgatggccgagggaagggcgccgggccgatggaggcggacccaagcaagcagcagagcccgctcagccactgagaggtctgcgctatcctcgtcgtcttctgcgccagctgacaggtgagccgataagtagagccctggcacatcgagccctgcatggtgagaaggtccgagcgagggtaggacgtcagcagaggctcggtgagacgctaaggcgaaggcgggcagtcgactgacctcgctcgctcagcttgccaccgagcgtccgaacgagctcggccacctcatcaggcttgaagcagagaccagagaggacggcatcctcctcttgccggacgaccacggctgaccgtacggcctcggcagccggcgacctggcggcggcccctggcgattgcgagctctggtcgggcaggaggaggtcgactctcggcggctggtcgtccaccgtaagacccatcgtcgccgaagaccgtggaccgccatcgcgttcagactcaggctcaatcgctcccgacttggcccggagaaaggcaagcccggcgccgagcgagccacgtcgtttgagggacgctgccgggcctagccggtcagcgaggtgacttgccggttggctaggggcctttggcgggctgaccgagccactaccgctgctgctattgccggccgagaaggacgcccgaagcctcgcgaggaaggacgccatcctagactcgcgagggtaagaagaaaagcgaaaggaagggtcgaggtcatgtgcgatgcggacgagacgaagggacgggacccggccggcgcagcagcaggcgcccgccgctgagaccgacctaaccctagcttctcgacacggaagcagcagcagcggcgaggcgcgtcgctcgacctcggctggcctttcctcatcttcgacctgcctagttgaagcgcccggacgatggaagcgaaagcagcaagccgaacgaccaaaaagtgcgtacagcgcgtctgcccgtctgggttcccgagggaggcaggctggcgtcctgccgaagtcgacgtcgcggcgggcgggacgatggctgactcgccgcctccttccctcgcctcgctctcttgctgggttgccgtcctcgtcttcctcgggtccggtttcctccgcgctgctgataacgcagagcgtgccagcgctgccgttcgctcaaggtgcgcaccagacgcccgatgtcgtggtcgcgttcatgaggcgtggcgccgccggtcggacgaatgcggcgctccctgtcgcccgctgctgattcgaacgcttgctctttcctcccttcccctgcccgcttgatcttctccacgtgttctctggtcgcaattctctacacctaccgtcgcgtgtctggcctgcgcccgtccttctggcttctctcgccgtcgtcgccgccgtcgcctatgttgcgtaggcccgctgccccggcccgtcacccgacacggaccgctgcgcccgttgcatcaagggcggccagacggaatgcgtctacgagcagcacaagcgcgggcgcaaggtcggcacgcggtgggtccttccacactcttcttcctccccggcccggtacctaacgccagagctctctccgcgcagcctgtctgacccgaccaaggcgctcatgcgcatgcgttcggcgctctcggtgctcggagcctcgggcgagctgccgccaactgcgctcgagcgcgtgcaggctgagctccgcgaggctcaggcccgagccgaggcgtcgggcagcggcagcattaaggggaaaggtaagggaaaggggaaagggaagcaggctccgcagcagacgagcaacgtccagccaatccaggaacagcctgacctcgaggccagccccggcgacgacgacgacggcatcttcgaatcggacctcgacacaagcgacggcgtaggcgactcggcgggtggccggtcgtcgacctcgcctcgtcggccgtgtgccaacggcgaacgctctgcggccgactttggcggcttcgacggcggtcgcaacggaagtgcagggccgccaggcctcggaaggccggcggcgccttcgtttgccgggagagccgatgacggtccaccgaccgcagaaggctttgcgaacgacgacctctactcgtaccacctgccctcgatgtcggcagcagggctcggaggcggttcggctgccgccggcccgagctcgtacgcccggccaagctctgcggcctcgacctcgatgcgtgcccaagcgcatgcgcaagcggctctgttcggtcacagcggcagcggcagccgctccccccaggttgcgtcacttgggcagcagcagcaacagcagtcttcgccagcccagagtccgtttgaaggcgatttttttgccggtcagccgaggatgcccgggctccagtccggacgtcactcgcccgccggcatcggcagagacttttccggccgactgaccacggcatcgtccccggtcccgatcgacccctcactggccttccatcacccagcgttgacgtcaaacggccggtactttgcgcctggcctgtctgcgctcgcctctcagccgtaccctgcggcttatccgccgacggcgatcggcgcaaacggcggcttctcttccgtgccccgatacacgacagccgcacaggcggcaccccaccagtttgacgagctcatcccgctccgatcctcttcaaagtcgctcgcgacgcttctccgtccgcgcggctttggtccggcctgcgacggcgggacggactcgctcgctgcggccgaagcggcagcagcagccgaggaacgagcggtccggcaggacgtcgtccggatgggcctcgtcggcgagcaagaggcccgcgcgctgtttgcctttttcatggagaaagtcggaccgctcatctacctctttgaccccgagcttcacacacacgacgccgtccggcgctgctcgccgctcctttacgcgaccatcattgcgatcgcgctccgcttcaacaacgcgcccgaggagaagcatcggcgcgtgctcgccgtcgcgagagacaacgtcctgctcgttcttgccgacaacatccggtcggaagagacgatccttgcgctgtgagtccctcgagacgggtgatgggccgaccttgtggcggagcctgggctgaccacgtcgatcgacccccttgcgcttcagcatccttcagaccgagttcaagggcatccacgacgagggtgcggccctctgtgtgcgcgcctttcgccgccagctactgaccctttccgacccctccaggctcgtatctcatgctaggcatggcgattcggatcggcatggacatggacatcggccggccgctgcctcacttggtgcgtgactctggcgcggctctcccatcctggtccgtcttggctgatccgacttcatctatgctgcaggatgagcgccggaaccgctcgcggatgcggtgctggatcggcctcttcaatgccgaccggcgcttcgccggctgcggtcaggtccagaagccagagatcatggtcgaagacgcgaccatccgagcttcgtttgtcctcaccttcgcttggcccgcaaacgtccgcacagctgagcccccctccgccagcgcttcttcgatcagcccccgccttcaacatgtcttcctcgccgacgagcctcaaacaggcgctcccttcaccttccctcgacagcagggatcccagcggtgtctcgcagacgccgacgctcgctgtcgatctcaacgacgccttgtccggagaggagcttgacggcctccactttagcgccgccgcctccgatccgctggcctatccctcgcccgcccgccgtaaggtcctcctcgccttgttcgcagcagctcagtttgtcgacgtcgcgctcggctcgggagtcgtcatcggcatcgaaaaggtcggtcgctcctcgcccccttgctcttgaccaaagctgaccgacgatctgcctgccgacagattgctcacacgctccaaatggggccggctgcttctgtctggatcgtcaacgcctatgccctcacgcttgcggctttccttctgacgggcggtcggctggccgacatgtttagcgccaagtgggtcttcacgatcggtttcggttcgtcagttgccacctctgcttgctcagcgtgcgaccccctgaccgctccttcctgcatctgtaacgccaggctgggtcggaggtgcgcttgtttcaattattccgcgccagccatcgagtgctgaccgcgcctgaccctcgacccgcagtcttctcgctcgccctcggctttgtctcgaacgacaacacatttatcgtcctccgagcgctccagggtgtcggcgccggcttgaccatccctgcagccctccgaatgatcgtcctcttctttcccgtcgaacagcgggcggtcgcttttgccgtttttggcgcctctgggtgagttaacaagctgatctcagccaacgcctgaaagtcggctaacaccgaccgagttgcactccagcgcgatcgccaacgtcctcggcgtcgtcctcggcggcgtgcttcttctcgcttcctggcactgggtcagttcgggggaggccctccttgcccccttcgatccctcgtcgctaaccggccgacgtgtcctcctcgcccggcgcctacctagatcttctggagcattgcgatcatctgcatcccgctctcgatcgtctcggccttcttcaccccgagcacagccggtctcggtcaaagcggccggacgcctaagttcgactacctcggcacattcctgatgatctgcagcttcgtgcttttcatctacggcttgacgcaaggcaacatcggcggctggtgcgtcggctgctgttactttcctggcggtggatcgctcgctgacccgacccaaccctggctcctcttgtaggaacactggcgcagctcttggccctctgctcgtcggcgcggccctcttcccgctcttcttcgtctgggagggccggatggatccttttgacgccctgatcgaccccaagatctggcgcatccgcaacgtgctcctcatctcagtcgtctcgctcgtgccctatttctggtgcgccgtccctcctcgacgttgatcgtccggtctctttggctgactgatgtcctcctcgattcaggtggttcctggtgcaggtcacttacgcctcggtcatgcaagctgtctggggagattctgcagtcctcgtcggcgcgcgtttcctgccgatcgtgcgtcctctgcgcccactcaggctgggtcccgcaaagctctgtcactgacgctcttcatcctctgttctcttcagggcatcgccggcggtcttatggctgccactgccggctcgatccctttgtcgttcccactcaagtggcgctttgtcgtcggctgctttgcctcggccggtggcgccctcatgctggcctttgccgactcctcctcggactactggcgcttgattgtgcatcgctctgaacttcgagaaccccctcccgaggcactcgctgacaactcctctcggtccatcagttccctgctagcatcatcggctcggccggcacggcgctcaccttcatcacgttcgtcaactctgccagtgctgccattcttttggctgacatatctcgcacgcttcctgcagtggaaacatcgccctgatgatgtcgatcccgagcgagtttgcgggcgtcgccggcggcatcttcaacagctcactccagctcggcgtcgtcatcggcctgagcgtctcaactggtgagcctgctttgagcgcatggtctctctgtacctctggcctcgcgcgctgacacattgctctcgcactgcagccatccaggtctcttacccgaccggagaagggtcgccgctgcccgcctggaagggctaccagtctgcgtgagtcgtgtcttcgtctcgctcctgatactgcctgttgacgcccaccttctcctctagcttcttccttctgatggcctcgatgctggtcgccatcgtcctcgtcctcgtcttcttcaaggacccggtcgaggctcaggccgaggacgagggcgtgcccgtcgccgaggttaaagcccagcgtccgcctgttgccatcgtctagacctttcctgcagctgctccccatcccactctaatctagacggtctcgcgcccgaccctcagacacgaggccactacttctcctccttttacatgtgctcactaaagtcacaaagggccgtgccggacaaggagggcggggtgagcaattaagagggatgtcgtagcgcaagcgaaacaacaggggagcctgagcggtctgtccggtctaatgaccatgagagagcaaaaagggagcaagaagcgtgaaggacaggcagagccagaaaggtctggcagcaaggacggagagggtaccaagaaggacggagaaggggaagagcgcgggaggtggcgaaaaggggcaaaggtgggaagggaacgccggaccctcccgatgcaagaagagcgacgctgtaccacgtgtgccgcagggtcaagtttggcggattagttggcgtaggggccaccccggtagatgattgagagagcgttgggaccaccgcagagctggttggggttgcccgggcctgcagggcgagcgagagagaaagcaaggggtcagcggcggctgcggcggagaggaagtaagccgaaacggcaaacatacagggcttgtcgcaggcgttcgagccctcggggcgcttactgttgaagtcgcccgcatcgccgcagaagcacctttcatagtgggagggggaagcggtcagcttgagagtgcaggaggggcctgacgacgaaaggccatcgacttactcgtcaccgctgcgaaagggagcgacggggcgcagagtgaaagaggggcgggcagcgggcggtcagaagcggtcagtgtcgacaagggcaggccgagcgggaaactgaaaggcgggacagacttctggaggccagcgaggttctgacccctgccatcgcactcgctgacgcacatctgccactgttgggggttggcggcaggttttgtcagtatcgagcagcgatttggcgccggagcggaggcagggtggcccacgtacagtcatctgggggtgggccttcgcaagggtcataagccggtccgggttgttgtcgcggtctgtcgaagcgcaagggaaagcaggagcgaggggtgagcgcttgcagtcaagcgacgtggggaaagctctgcccagactgactgcactggttctggaactgccaattcccgaagcccacgacctgccggccgtacttcggggggggggggacgatcgggtcattggagatgaggagcgtcaggcggcccgcgtcgccgcagatctgctggtcgttgcccgagcacttcatggtgcctaaaggagaaaggagaagccacgaaacgagtcagtcgtggaacgaagaggagatgctcaacctcgggacacgcacagtcggcgggtgtgagctcctcagcccgctcgatgtcgactttcgccccgcagaagcactccctttcgaactgaaggccagcgacctgccagccgcgctggaagcactgtaggaagggtacaatctatcaggccttggtcgagacaagatcgaaggggaggacgaacgaatttggcgcagctagcgtagtccatgctgttcgagttgaagtcggcgcccttgaagatgcggtcgccgacctggagaagggagaagggagaggaatctgtcagcaagcgactctgaaggtctgatgagagggatgggtagccgaccttgtcgacgatgcagcgaccggtggcgaagaagccgttcgggaggttgtcattgcgggccgcgacctgaggggccgggagggcaaagacggtcgacgcgagagcgaggacggggaggattgtgatggcgagcatactggagggtgtgttggttgggaaggggtgagattgaggggaaggtgatgagcggatgagggggaaagagagcccggctcccggcctcccctttatagtcctcgagagcgacgctgccctctcgtcccggcacagcctccaaggcctcgcgaccatgggactcgaccgagaggcgtcgtcttgttggtggcgacgcggtggacaatgggtccgggcggccacggcgccgggttgacaagcttgggcaaagctcgggctcagctcagacgaggcgttctttggacgcctctgtgaaagggtttggacgcctctgtgaaagggagaaccgcggacatagcgtcctcttctctcccgagcaggaaggtcagcgcgtccacgacggtcccatcgagcgcgaggccaagcgcaggagattgagggtcctggtcgagctcgttgcccagccagccaagcggcgggtctgcgaccgtcgccaggaaggaggtgatgaagctttgccttcacgcatcttctgcttgggcagctgaaggcgtcgaccgacagaacggcaaggcgcctgccgagatactcccttcgtggcaggaagggaggcagatcggctggagggcagcgccgggccgggtggccggaagggcgacctccctccccaaccgcgttgcgccatggggtgagtgagcaggatgcggaggccggggaggcgttcgcacgtcgagcaccggaggtactagcgtgtcgagcaagcagaaaggcgtcctgcgagtgacgtttgtcgttaagaggcgtcgcggggaggtgcgagcaagagggcgagcaagggacccacgcgtcgggatgcgagcccagctcggccaagcggcggtcgacctcccgatggaggagccggactgtccaaagtcgttgagtgagcgtcaggcgtcgccctctccggtgcgagagagctcgcatgtcccaggtgtcggtcgaagggggtgaggagcaaggggaggtgaagagagaacgaggcgtcgcgacctccccggtgcccaaacagctcgcccacctcgcattaattacctgcccctttgcgcccgtcgatgctcttcctctttccaggcgagcccagcagtcggtcgaagctagcgcaagagtgccgtctccctcgtcctcttacgcctcggtctcgcatacctccccgccgaccaagagatggctgacctgcgcccggggggggacgccctcgaaccagctcattacgctccccctggcgtccctcgctcggcacgcatgcgagagcctcccgtctcggtccgacggctagggaatcggtctgcatgtcgcggtcaaacctatttcttgaacaggaagcatgcaatatgtcgtcgcagccggtcgggttgcgaagatgcctggtcgtctcgatagcccctcctcccctcaaaccctcgtcgacggaacgccacgctcgtcgcagccgagcaggccctgccacagttcgctgacgccgtccagatcgccgccgacaatctgcccggtctcgcggagggcaaagtcgggctcggccgcttctgcgaggtggacgagcgcgagcgaggggtgcagcggtgcgccgttcagcgaaacggcgtcgacttggaccgagaggacatggtgacggctgtcatggctcaattgagtagagcgctgatgagcagggtcgcgcgacaaacgagcgtgaggcgacgtacgagggcaggaagaggcttgggtttgttggcggtgcggcagctgcggccgagaagggggcagcagccaggccgttgaagacgtcgtacatctgtccggccgtcatgagggtcccgctcgtgctgataggtgcgaggcgaccaagatggtcagcaatagattttgtaagagaggagagttgacgcgactcacctctgaagcacggcgctggcgaggacgtaccgctcggctactgctcgcgcctcgctcgcgctgtcctgcccggcgagccagagcgagtggatgccgtgcgcaaagtcgccgtccacgtctggcgtctcgatcagcgaaagcagcggcggttgcgaggccgagccgaagaagccctgccagtcgacccgcaggcctaccagcagaacggcgtcgtccgggcggacatcgaagagagtcggcgaggagggctcgcggccgaggggctcgcccgtctgtgaagaggcaaggaaggctgcgatcagaagaagctcggtctgccgcgtcgagtttgactgaccgcttcgaggatgagcgcactctcccacgctgtcctgagcccgtctccatcgggccgggtgacctgtcggatgagatcgatgcgccaaataccctcggccattgcctttgcgccgacaacgcgaccgagagcgcccccctgtaggtcgccaggactgcgggtcatcgcaagcgccgtgtgtagccgggcgaggacggcgcgaagcgcgacacagagttgccgagggtcctctgggccagcgtagaggggctgcgagacggcatcgaaggtcagagtagagcgtggatggcggagccgctcggtcgaccagaggtggccgagccaggacgcttggacgaagtcgaggcggctgtcggcctcacgctggcgggcgagcaagtagggccacatgtttgccgtcgcaggatcgaccgacgggcgagagaggtaggcaaggaggcgagcgccgggaaagaagcgctgcagccggtgataggccgagaggaagactgtgggtgtatggacgcgaggcacacgatatcagcgccaatcgctgcctcaagcaccatcgtcgaccgggcgcaccggcgtagcgcgcaaccttgccggctctcgcgaccgcatcccgctctggctgatccaaggccgagaaaaagagggcaagccggtggactttctctctcgatcggatcggaggaggaaggctgactggccggacgagactcgggtcgtccaggatgggcgcgaaggagaggttggaggcctgtggcggccgtattgcagacggcctgctggccgaggacatggtcgaagcggaagccgtcggccgagacgacgtgctcggtttcggtggacggaaagtcgagcgggctgcagccggaggacgagctgccgttggtacgagcgcagctgtcggcaaagccgagaccgccgtcgtcgagggtgaagcaggcgcggctgaaaagatggacgaggcggtcggcggctgaggaggccgaggtgcgcttgcgaggggaaggaatgccgtccggttggcgatcgagagagggtcggctgggggcttgagccgtttgctcgagcccatatttgaggccttcgtcgcagcatgggctgaagttgatggatcaggtggagcagccgcaggtaacgccggccgcttttgttttgtgcggctcgacgagagagcgaggaattgagatgatgacacggtcggcgggagaaggggagggccggcgcgggcgacggaacaagctgagatgggtgcatgctcgaccgccgaacgtcgagcgtgaatttcggtcgtgtcggcgccctcgtcggcgtcgtccgaccagtggaggatgtctctggctggtgccgagcgtgaactgactggaagaggggcatgagtggctgacgacgtgaacggggccggtgctgccagttcggtcggccgtgaaggtaccgacggcgcggcgggcgcggtcgcctgtggcggcgctgagccaagcagcttgtcaacgagagcatgtttgttgagcttcgagtagcccgtaagcttgagctgaaggtgttcaggcgaggcggagggagggtcgaggtcagtcggtggtcgggctgcctcaggcgggaagcgcctgccgacctccttgcagcaagcctttagctccggaatccgaagcttctcgagggcagcgcggtccatctggatcgactcggtcggatgctgaaagaggaggagtggagaaggggtttgaggagggtggttgttggaggggagaatgtatggccgtcagcgtccatgcacgacgcgcgtcggtcgatcgacaagcgctcggttgtcagtgcgtcagcgaaccccgcccatgaggtaatcttcgtcagaagagagtcatgctgacagcccgactgtcactgaacttggtgacgggctagacgacatgcggcgagggcgcatactatccgcggacgatgacgctgcagaccgacctgtgcggcaatgagcgaaagagaccgtcagcaaggagtcttccatcgacagacgacaagtggaaggaccgacttgaggttgacggcgaatccatcgtcgacgccgacgaggccgagcgtgtcgaccggatggacaccctcgctcagggccagaaagcgcatccgcacgctctggctcgtccgaggcacgagcgggccgattcggatcgagttctctagcggtatcaagggcgtagaggaggccatatactctgccagccgagcgcgaagcgctggagacggacgagagagggccgtcagcgacggcggtcggcctcaggaaaaatgggcgtgagcgagacgcaccttccgcgccgagaccacaggctcccgcccagccttcgccctcgaacgcgccggccggtccgttcgccagcggacgacgccgacgacgcttctccggtacaccgaggtcgaaccgacgggcgatcgccgtcccgttgaagacgaagacctcgagcacgaatggctccaggggccggatcgcttccttccgccggagcgggacgtactcgcccgagggaccgagccgaaaaacggtgatcgagacgaggacaccatccgcctcgcgctcatagatgacgtggtcctcgaccggcacggccagagcgtgcgagtctgaggttcgactcggtgtcgtcgccggcagcgcgtgcggctggctggagccagctaatggctgctgggatggcggcaggatgggcgccgccctctgaggagggaaagccggtgtcggcatcggctgcgtgagcgagtcccggtctcgttgcgagctgccctggccgttgacggcgtgctttggcggcagagcgggctgcgcgaggctcgagacgttggcaagggagaaacgcttgttgcctgcgatgaccgacggcggccgctgcggtggcttgctattgatcgacgctgacgctaggaccgagggaacgccagccatcactgggaggttaagcttctcctcggatgcttcggcgagatgcgaaagatcgagcgtgcagttccacttgctgacgaaagccgccgtcgggtattggcgctgaccatcagactcgcccgagtagacgaacggccggcctcggacagagatcgagaccggccgatgcgactctggcagcgctggcgatgcttgcggcagaggaggcggttgctgaccgaggccctgttggcgtgagcgcggctggaaggctgcgagcgaggcggacggcaggcgctggtgacccgccgagccctgctcgggagcagctgatggctcgatcgagacgacgtagaggagcgagtgctggtcgccgtcagtcagctcgagaggaagcactccgtcttcaccgccaaagagctcggccctggcgaccgcgccgccggcgccgccgccgactttgaagtcgatgtgctccaccgcaaagccgagctgtgggccactggccgactcgatctctacgctgacgacgaccttccgctcctcctcctcatcctcgtcgccgtgaccgtcgccagcggccgtgccatcgaggacgagatggggcaggtagacggttcgcatccgaagcgagaggccgctgccgagctcgaggacggtccggaacgacttgcgcaacgtcggcagtgacaggagcgtcgtcggcggaacggtcttgggcccctgagattgcgacagcgtcgggtggacagagattgacggctgtggccctcggaaacgtgcggcggggaaggccgccttagaaaggccttcgaggaggtcgccgccaccgccggttgccgagaggtgtacaatctcctcctctgactcgtggagtctggggctcgtctcggagcttgacggcgccgatagatcgagcgcttcgtatccgcgcagactcgaggtggtcgccttgtcgcgaagcgtgatgctcgccgtcaggcagagcagcgggtcgctgatattagttcggacaaaggcgaccgggacgtcgagtccccagacggcgacccagaggttctcgtcggccagccaggccaggtagacgccgttgtcggccgtcggcgcccacatggccgagaagacggagatgccctcggaccggatgtaccgccgctcctcatgcgagccgaccgacggcgtcggcagcggtgtcgagggcgtcggcgagccagtcgggagcggcggcccgcccgagactcgtcgggcgacgtgcgcagggacggtcgacagcgcgccagacgcgcgtctcgtcggtgtcgatggcaggcccgtcggactcgctggaaagtagtggccgctttccggcctagagggcgaaggaggcgccgacgagccttccgccgacagaggcgacacgtaggacgagtcgacggtgacctggaggtgctggacgaacgacaggagctcgcgagtcggctgcgggcgcgatggcggctgcgtcgagggcccggcggcgtcgcccggcagtgcaggcagcttgaccgagaggtacgagcgaagatcctcgtctgagcgcacaggcggatcagtcgaagctcgtgcgattgggctgaaggcctgacgacgcaccatagaacgcctgccggcgggacgagcttgcgagcagctcagcgacccatcgctgggccgattcgggcgtcgcctccgctggcggcgagccgagtgccggcggcgggacgtggatcgagagccgagccgcgtggaagagggacgaaaacgacatgcgtctcggggagggggagggctggttgagagacagggaccgagaggagtgacagggcgcaggtccaagctcaggcggcagagcgcgggaacctcaaattcgtgcgcgcagaccacccgtacttcaggtcgtcagtcagtcgcatgtgggcaaggggtcggagaggacgggcatgatattgcgcagacagacatgtgctgcacggatgagatcgtgtcgtgaagcaggcggccttcttgcgttgacgaggcagtggccggaggcatccaccctccgtcggcctcgctgcgcgtgcgagacagaggcgtcatcggccgagcacgacagcactatggctggatgatctgacgctgacgtagcctagaggtcggttgaaggcgcgtcgaggctgggcagaatgtagagagagctcgctcagccggctcagactcgcttctccgagacggacccattgcttgcctcggcccgggcggccgcctcgcgcttgacgtccttccgacgcatgatccaggtgatgagagggatggtgatgaggctgatagggtgagtgagccggccgatcagtggtcgatccagaagatggagatggcgagatggtcgcttcgcttacgagaggcagatccaaccgaggaggatgccgcatgagcgagcgatacggttggccgtcccgaagaggatcgtccgcagtgcttgcgacagggcgtggaagggcaggccgttgcccacgcggtagattacgcttccggagagctcgatcgggagcacgacctcggagacgctagaagggtgggagtcgcgcagtggtcagcgtcgaccaaattgacgagcagaaggacggcggcgaccgacttgaggatgatccaagcgacgaggaaaaaggctggcggcgtggcggtctcgtcagctcagaggactgggcatcatggtgcacaggacgcgactgaccgatgaattttggcgtcaagatcgtgatgaagaactctgtggcaaggctggcgggcgcgcacagcgtcagctcgtcgtttgccgaccctgtgagaagaaagaaggacacacccgagggccgccatgccgaggtagaagaggaacgcggtgaggaagaatcctcctgccgcggtaaaggggccttggccgaacggcaccttcgaggagagggatgtagagtgagcgataggagaagaagcaagcaaaaaggaacgaagaggctcacctggaaggccaggttgatcatcgaaaacatgaacgagacgggcatgtagacgaggagcgggacgacgcagcggagcgtgaggtaggccttatttgtcaaccacggcctggagggaatttagggtcgtcagcctcgacggatcattgctcttggtcaagcaagaggacgtacgccacgatctcgcgagcaccaaagtgagccatcgtctggatgaacgccaagatcaagaggtagatgaggctgtgagggcaagggttcagatgagcaagtgcccgggcagcagcgtaaggcgggcgcaagcacttacccgacgagtgtcacagccgtcgcctgcaaagtaccagtaggagggtcagctcttgcgccagtctcctgtcaagggaaaggacccgtgacgcacgacgggcacgttgtacggatgcagattgtcaagcgagtaggcgtagccgacaatggtcgacggagcctgagtaagcagcgcgagcgcggtcgcgttgccaacgttggcttcgatgtagtcggcggcgctctgagcagaagcgcgcgccagagcggggccgaggacgcttgagaaggccgggacaatgtagtttcccgcggcgagctcgttgcggccctggttgtagatggcgacgacggcagaagtgctctgcagatggaagcgcaaccgagtcgaagacaagtcagaagtcggcccatcgtcggctgcagtcgacggcttctgaccgagtaggtcgcgtcgcccgtctgccgggcctgcaagaggcgttcggccacgccgctcctgataacgattgccgcccaggcttcctcctggtggacggcattggcgacctgcgagatgtcggcaaagcgaccggcctcgacaaactcgtagccgaggtgcggcgccggaccctcgagcgaggcgcgtgttgctgcgatgaccgcctgcgagacggccgagtcgttgtcaaagtcgacgacaaacgtcttgagccggtaggcgtactcgggcgccttccagaggctgccccagtacaggctacgatggcgatcagtcgtaaactggtcagcttgcgtgcgacaagttgagaacctctccgaagactgacggcaagcaagcccacatgatgacaatcgtcagcatcgcggccgagatgacgatcttgaggtagatcttgcggaggggagcgagctcgcctagcagacatcatatcagcggcgtcggggcgagcatcagagagcggaagagaacgcactgtcgaagaagccgtggctgtactttcgtggccgggcagggccgggcgacgcctttttcaagtcggttagggtgccctgctcccggagccggcagacgagcggggggcggtcagcttgaactctagctagtatagggcgagctcgacaatcatgctccgtctacccagcactctggccggcaagaggtcgcaacctcctgctcgaagctggcagcagagcagcatccgcagccaggtccggcgacagggatgccaggcggcgccttacgagactcacgttctcggcgagcgagcgtccatcagcggcgatatcgaccgggttatagacgtcatctggtcggtcctgtctggcctcgcgctcaaaggcggcttcctcttgttgggaggcgcgggcggtcgtcatggggcgctggtcgggagctgggagggaagggaaggtcggcgatggttgcggcaagctgagcgacgagcgtcagaggcagctggtccgagttgatgggatgcgagagggagggcggagagatctgtcgccggcctttcgagggtttggatggttgagcgaaaaggctcgacggttgctgctgacagaccgaggtccctgcttggaggtcgaccgagctcaccggccatggcggccgagcgggcccaaggccgacggcggcagctgatcaggaatagcccgaacgctcgccccatcgtccaggattcctgctcgattgctgtgggctgtgaggaagcgagcatagcagaggcaagcgtctccatcgtgtatgctcagcttgactcgagctgaaggaggaggatagggaggaggagggcggctcaaccgccgggtgctgcgccgtctgcctcgggcgacgaaggccgcgagcccgagcttcggctcgcaagccgggacccgaaccggagccgacgtcgagccagcataacaggcgggctggaggcatgtgctgctcgcaggtctcgcacagcaagcaggctcaggcaggcggtcgtcctggtcaggccaggtgtactgctcatgatcggcgaggaccctgttttcaaagtattaatcattgagcaactgggacagccaacatcaactgccaagtgacgcagtggtagcgtgatgggctcataacccataagtcactggatcgaaaccagtcttggcaagagatttcttttgcactgctggccgccgggctcaacctcgcgtacgtcagtgccctcctttttgccagagccagaaccactccatctccagctgagtccactcaagagataatcagaaggtcatgcgagactggaggcagacacgagggggtctgcagcaatgcaagcggtgaggacgacggtacgccgaccgtgagagcgacgaaggaaggaggacgcaggtgcgccagaagaagggatagactggagcgaggaggggatcgttaaggggaaagaggagcgggtcgtaacggacgtgagcagggtggggaaaagagatcgtggcgagaccgagagagagagggcagacaggggaggagggcgtgatgagcggcgtgcgatccggggttgcgaaagacggagcggacgaggatggccaagacggcggccaaggaaagactgggcagaaccggggcgatgactgaagagcctcagcgaaaggcggtgacccgcagctcgacctgctgatcgacgtcgagaaagtcgaggtgctcgcggaactcggcggggaacttgtcgctgcagacgggcggatggcgagtgctcggtcagtcaacgctttgacgaggagcaagtcaagcagcggagcgcacctgagtgtcacccagtcgtcgtcgtcgtcctggtatgtcagcttgatctgattgccctcgagctccggatggcctcgacagactgcagaagatggcggtccgtcagcgacagcctcgcaggggactcaacccgagcagtgctacgcacgcttccgatagacgcgatcgcggagctcgggcacgtcgacgtcgcgcgggactttgaccatgtggagcgcgctcgcatagtgaatgcggatgaggcaggccggcggctgcgatcctggaggcccgatcgaggacgaggtcgaattgctggccgaatcggtgctctcctgacgcgagatcggggtgccgcctgcccgaccgccataggccggcattggaggcgcagacgccgcctcgtaaggcagatggttgcggaggttggaggccgaaccgacgcgcgaccgcggcaggctcgggcctggaccgccgttcgtaaaggagccgtccgagtagctgctcgaggcggccgaagcgatcgacatgttgcgcggcagcgccggcggggggaagctgccgaagctgcccgacgactcgccttgcggtgtgaaggtgcccgagccgggcatcccttggggcgtgaaggagcccgagccgggcccattccactcgccgccgttggcggccacggacggtcgcctgtgcggctggaggcccgtcggcgaagccatcgtcgtccggggcgacaagcgcgcctggcgttcccgcgaaagctggcgctcctgccgctcgtgcgcaatcagccggttgacggtcgactcccacttctggaggagctcgtcgttccgcatgtggagcaggaacgaggccgacgtgtcgggcgcgtcttgactccgccagtagagctgaaggccgagcccgccgtcgcgtcgccggatgacctcggtgtgcgtcaggttgttgacgtagatgcggcccttgagcaggagctcggtccgctctgacttgccaaagccactgccggcggtgatcggccggctgacgggcccgcttgacttattcgacttgcggttgctcttgtcgttggcctgcgtgagcagaggagagatgtcagggtgcgctgctgcgaagagggcaaagcggagtggagcgacgcacatccttgcagcacagcagcatccgctcaaagagaaagacgtgatagtcgcgctcgctgccgccctttgtcgccgtcaagaggtcgtcgacgagcaggtcgccaaagccctcgggctcgtggcccttccagtcggtgacacgccgcttgagctcctccttggtcgccgcattctccttcgcgcgcgacgtctcgttaaccttgtcggtgatgcgcttcaccgagagcaggccgagcgcgagcgagtcgtggtgcgtgtagtctgagtcgttggttgccttgacgagcgactgcgaagggttgcgttcgtcagcgacaaagggacgctccattgccggagagtcaggacgtacgttcagcagcagcggatacttcgtgatgcgctggatcggcttgatgaggaaggccggcagttcgcgcacgggctcgaggatcaggtcgggcttggccagcagctgatccttgtggaggactgccgtatcgagcgcctcgagatagttggcgcagaacggctcgtagacctcaaagtccttctcctgcaggggtcaaagggtggagtggcgtcagctcgcggcctcagctagggacgagggacggcccggctcgacgacgtacgtgtttgatgaacggcttgccccagtcgcccatccgccagccgagggcgtcggccttctcggcctcggtctcgagcgagatctgaaacttgcgctgaaagtcgagcaaaagatggaggttgctgaagatcgtgtgggctgtgttggtcgagatgagctcattggcgacgaggctctcggcgtacgactggtggggaatgacggggcgatgcgaccggtcagcactcgggtccgaaggggggacaaaggatgcagaggaggacgcacgtgcaaaacctcgagttcttgaatgtacttccgctcagtctcgacgagctccttgacgaggttggccgcctcgcccatcgcctgctggctcccaggcccaccgccggccgcactcccgccaaagcccatgagggcagccccgcccggggtgaccgctcccgggatggcgtggatgcccgtcatgaagccgcctggagtcatggccgccgctgctgcgccgagcgaggacgagcccgagtcgtgcgggttgaagcctgtcggcggcgagggcgggaaatgaaagtgctggccggtcggataggccgagacgggcgagagtgggtcgtaaacgccggtcccgcccgagatggacggccggccaaagtgcatcggcggcggcggcggcagcaggtcgagcaggagcgagacggtgtggaagatctggcagcacgcgggtcagcacttcttcaaaactgacagagatgattggctggcgcaccttgacagcctcattcgtgtctgtgccaaagacggccgtcatgcgccagagctcggtctggccgggccagccaccggcttcgaggacggccgtcagctgcttgagcgcgttgtaaagcggcttctggcaggccttgaccttgcgcgagtcgcgagcctgctcggccccccagttcagcgcgggccggccttcggcctcccagacaggactctcgccctcaagcgggacccagcggctactcgagccgccagggaggtacggcgcccagacgcccgtcgcgccgacgagattgacgagcctaacccatggcgagccgagtcggaggcaggaccagacgtgctcgactgccgtcggatgctcgccctcgaagccgagctcgggcgagggctcatacgagaggtaagtctcggcaaaaccctcgatcgcccgaaggtggtggaggatcgccttggccttctggaaaagggtcgtgctcccggcggcggacgagatgccgccaggcccgccgctgaggttgggcgtgcccgctccgccgggcccggtgccggtcgcgatcgagagctgggtcgtcttgagcgagagcgtgttggtctggccggccggcagcgtgatctgcaggttgggtggccgcgaggcattggccgacccttgttgagggaccggctgaggcgtcggcggcagcggcgaaggtgccggtgacgaccggtacgacagcggcggtgtgtcgtcggcttgcgaggggaaggcgtaggggtgctgctgctgctgctgctgtcggccgccgaccgagtcgtacggcgacggctggtgctggtagcgtccggccgccgcatgcgggaaggggtactgcgtcgtctgcgagtgatgcggcccctgcggatggagctggggcgtgtaggcatagtcggagtgctgccgggccattgtgaccgaggacgagctggccatcctcgtctgctgctgctgctgctgctgctgctgctgctgctaggcgaacggtggagcggtgacggcgacggagctgttgctgcacaggaccttgcttggcagtcaaggagagggctgggggtcgtgtgttccctggtcgggagccgagggacgaggtcgggcgagcaggcgagggctgaaagggaccgggagcttcttcgagcgcgaccgagggcgcgagcagtcggacaaggagggccaggcggggtgcgatgtggctgcgagtgtggactgtcgtacgagacgaggcgagacgggcgcgaaatggagccgaagcggagaggcgaccagggcgagtagccgggagaagtgagtcgaagagaggaggcgtcggaagaggcgcgcgtgaggtcgtgctggcgagcaacaggagccggggggacaatcggcgacgagtctcgcctggagtactcgcagcgttgtagcgtgaaagaggacggggggcgcgagtgtgctcggacagcgctgctggcgagagaaaggaccaggcgagggagaaggagagaggaagaggcaaacgaaagagcaagggcggaaagtgaagacaaagaggcgagggcgcgcgtccgggaatgcggggaagccatgctggagagagtcaaccgactgcatgccgacaatgatccttgctctctctggtaacgccggcccagcagcagtccccagttgcaatcctgccacctgctgatgcgacgctaacgagactctcctcgctggtctgtcgacgccaactcctgctgctccctgctagccaggcgcggagagcgacatctcgcgccagaccaccgcccgtgatagcaagccgtcgcgctcgctcgctcgctgcaagcggtcagagaccgacagcggcgagcaggatgtgcgtcgcacaagagagagctcgcctggcagcacagcaggcacttctcaccgatcttgaggcagaggctccccagcagaagggacggccggacgagcaggatgcgtaagcctctcacgcgaggcccgacccagacgaatgggttgggctccctaccggccggccttccaaaacaacggcccagctcaacgggagtggaagcctctcccggggacgaagccctggcgagagtcggcggccggccggccgaacgctttgggcgactcgcaccaacaggatcaaaaaggggagaccccggagagggctcggacgggcttcgctccttcgcgagaggccgaaagcaaggccctcggcaagagtagtcgcatgaaatctagatcgggtctctcttttgtggcctttcgccgcgcacttccctaggcgtaataactcgtgccgctgaggatgccgttgagcgcgctcagctgttcctcgttgaacttgcgcttgtcctccgcctcccaagtgtcttggtgggactgtttgaaggcggcggcgatcttgaggactggagggaggcgggagaggcgtcagcgtactgagcaagaggaggcttcgctcgtaaaagacgagaaggcacggaccggtcgtcttgaccggcattgggtccgagacgtgcggcgcaagcgagtcggcaatgagccccggcacgtagcccggcactgtgtacgggaaagcatcgatgctgcaagggagggcgcgtcagcacacaagaagacgaggcggccacgagagcaagatgagacgcacatggcgccgacgccaaggatggcgctatgcatgcgcgtcaggctgcccgcatagtccgggttgacggagccgtcctcgagccgccgcttcgggatcgtcgtctcgctgacctggcgctcgaagcgggccttcatgacgagaatgcttgcccgttggctcgtccgcaggatggacgagagggccgaggccgccacctcgcggacctcgatattgtcgtcgttcaggcactcagtcaggacctgcgacaagagagggcaagaaaaaggtcagcgcacgcgatccttctcgaaggtcagggctgcatcgacgcacctcggtcagccggttcgaggtctcgccgtccaccatcgggagcccgcggaagtaggccgtcgcgaggaccggcaggacgtgcagccggatgtgccatgactgagtggatgactgggagtcagctctctgcctcagctgctcgtctcggcagccgaacggaccttgtggttctgcagcgtctcgagcaggacgccgagcagcgggcggaccgtctcgagcggcgggctgatgctcgcgacgagcgaaagaacagtcgcgctctgcttctgaagctcgggcgaatcgcgcagctcgcgcatctggaagatctcgggcagcagcggcagcacgagggcaaagcccgacgcgccgttgaggtccgtcaggccgcgctggacgctgtgagcgtgaagtggggtgtcagcgaatggcagattgcatggcggcgcggagcggggcgacactgactagcgcaggagagcgagtgcgtgcttgtcgtacatcgacgacgggccgagcgggccagacggccgctcctcacgccacgtctcgagcgaggcgacgagtttcttgatccgcggcaggtcggtcgcccggtgcaagcccatcggatcgcgctcgttatggcagagctcaacaaaggcgagcggcgagggtgcgcagacgcgccactggagaaacggtagatatttgagatcagctcgtgaaggctgagcggacgactatgggcagagacgactcacccggaccttctcgagtcggtgcaggttctgcggggcggtgaagcgggtcagcaagagaggagagctgtcgaagcttgagccagcgccagacgcacgtcggcgagcaagttgcggatctctgcgaagtcattgccgatgtggcggaagaagaggtcgacaaagtcgccgctccaggcgtcaaagcgccacgaaaggcagcgcatgagcgcgttaaggaacgtcagggccttggtgcctgaaggaatcagttgggtcagccgctggggagcagagaaggagccgctgcggtcgacgcactctcgaaggcaaagccgatggacaggtcgagtgacttggcgccctggatgacaaagtcgacgagcggctgcagccggcgggggtcacgcttgtagactgaggaaagagtgtgcgctgtcagcctctgagcctttgtgtcgaaggtgcagagcaagacggcgagaggacacacagttgaattcgaagaacatcgtccactccttgagcgtgtcgggtttcatgatggcgccgatcttgggcaggagactgcaaaggggaccggcatcagcagcgagcggaaagcgcagcgctcagacaggtcgacgcacggcgtcagccataaccagaaggcctggcgcgccttgccgttccagtgcttgatgccgcggacaaggcccgagacaatctcggcgatcgcccgctgcttgtgccggtctgggtcggcctcggcgagaagcgcgtcaatctcgccgcggaccatctggaacggctcgtcgctgaagatctggcagaggctcttgatgaagttgatggcgtcgccgctcagatactagcgagtcgcagaaggcaggagtcagcgatgaaagtcagtagaagcgagccgcagcagagctgaccttgcgcgtatcctcctgggcgtagcggttgacgagcttcttccaccacgccgggtcgcgcacgaacctggccatgacggcgacagcctcggccgaggtcgggtcccagtcaaacggctgctcctcccagccggcttgccggtagccgtgcagctccttgtcccaagcgagccagcccgatgtcgtcttgtcctgaaggaaggtcgtcgagtcctcgaccgcgatcggcttccggaacgtcgcgagatacccggcggtgaagcctgacttggctgggtcgatcggcatcgtcaccttgagcgggttccgtggcagctcgagcagcagtcgctcgtcgtcgtgctcacagagcgtccggagcttgacaaagtggagcgccttggtcattgacctgtgcgaacgaggaaaggggcggtcagcactcgccgccgccacaaagagtcgagggctgattttgcgcacagctgggcgtaatggcggagctgaggcaggtcgtcgacgacgcgcgacatgaagaactcggagatgcgcgggttggacggtcggtcgcgccggacaagcgcccggagataccgtgaagcgtagacagcgtagcgccagtgcgtcgccgagctctcggccaggtcgagcaggcggccggtctgagtagagaggggccggttagccatctaacggcggaaacgacgcggatcgatgctgaaggggcgcgcaccaggtcgtccaaggcttggtcacggaatgcgatccgtgcgtcgacggcggcggcgacggcatcgaggagctccttgggggccgcgtacaggccgttctgaggaacgacagcccggacggcagcgtcacgccgtgcactcggcaggttgcagcggagagtcgagggctcggcgacgcggacgatggctgtcaggtcggggttcgacgcacaagacgtcagcggcggatcggcaggaacaggagtatgacttgttcataacgcactgtcctcggtgatcttggcgacgaggttctggatcgatggcttctcctggtcctgggtcgcgagcgtcttgagaacaaagtcgccaaagaagcgggcgtcggtgatgctgaacgaggcaaaggccttgctgccgaggatctgcgaggggagcgaggtcagactggcgacgctggccggaaggacatcgggaggggactgacgtagagagcgcccttcatctgatctgggtcgatgcccctgtcgagcgaggccagcaggcgcgggtacgagagcgacttggtgccgtcgtagaccttggtcaccgagtcgagcgtgctgcgagcgtgctcaaggccggtcagccgccgcccgtgcaatgtgccatgaaagtgatgcgggaggagggagggcggggacgcacgtctgactggtccgccggatcttgacgtaggacgagagggcaaagtcaacgagcttcgagatgagctggtcgtcgagcgccgacctcttgcgaccccagctcgttgcccgcgagcgcgaggcgtggtaaagctcggccttggcgatccagatccggcgcgggaggacgcgctgcttggcatagtacttgattgacttctgcagcaggtcaaagttcttctttttcgaatcccatgtgcgctcgtcgatcccttgggcgagcactgcagggaatatgcagagagtcagtcgtcagaagcctcagaggggaaatggggcttcagtgggaacgcacggtaggtgctgagcatgcccacgatgccggtgacggcgtcgatcgagtcatcgccgccctggtcgcgtaggtagtgcgttgccttgagcacaaattgaccgagccgctcgcggaagcgggcgtgagcccggtggcgcgggtcggtagggtccgtcaggatgaaggctgccttgagaggcgcgagcggctttttccactcgtcgggcgcgtcgctgtacgagtgcaagaaggggttcagcgccagtagagagagtcacccaaagtcgacaaagccaacgcaccccttgtcggagacgacggtcccgccggtcttgctctccggatcttcgaggtagaacgagtgcagggctaagaaaaagggagtggacaggtggtcagcacactgcgaaggccagacggccgccacgtccgctcaccctcggttccgtaacggagtaggctgaggtcgcggcagaatgtgtgcgtccattccttggtcggcggaccgtccgggatgttggactcgagcgcgccgagcgtcggcgtcaggatctcgtcaatcaggcgctggacgaacgcgacctcggcgtcggtcggcacgtgccagtcgagcttgcactcggatcggcggtacatcttgcctgcagggttggaagcagcgagatcagcagttgattgcgcagagagacagcgtcgagcaaggagacgagcgtaccccaatgcagatgcgagtgctgttggaaagctgtcgggcggagggagatgtcaagaggtcgtcagccggcgcgcaaggggaaacccagtgaagcgaaccgccggcgcgcaccctcagtcgaccactcgtcggcgttgatgaacttggcgtcgtacgtccagacggtcgtcagccgggtgatgacgcgaagcatcattcggctcgtgatagaccagctgcgctcgttccgggccgtcttgcccatgtaggcgagcaggccaacgagctcgtcctggtgcttgaggatcgccggcgtcgaccagctgagcattcccgagaggatcgccatgtaggcgtggagcgtcgtgtcggaagcgagcggcatcgatgccgctgtcgtcggcaccgacgacgccccattctcgagctcggcccggatcttgcgcgcgcagagcgggaagaagcggtcaaacacggtctcaaactcggcgtgggcgagcgaggcaacgagcacgccaatgacgttgaccgtgttgggccggactgtggggcagggctcggtcagcgtcaaaacggcaagcagcgagctctttgaagagagcgtgacggaccagtcatggacgcgtactcgaagatctgctcgacagccatcgtaaagaggctcggcgaaaggtggttgaagaccacggctgttgccttctggaccatgctgttgacagcctcctcggttttgccaccggtccgaagactcttgccgccctgctcgggcagcgcctcgaacaaggagaggatgctagcggacgagtgagcagcgaggtcagtctcgagtattgcgaccgcgagcgaagaagcccgcgcaccggttgatgtactcggacagccagtcgcggacgctgccagtcgagtagcgcagcgcctgattctcctcggctggcggcaggatcggtgccgtgccctcggccagctcggcaccgccgtcgatgacgatggggatggccgaggccgacgcccaaggctgctggttggcgccctccggcaggtcaaagtcggtcaggtcgacgagctggacaaactggatgacgctggcgatgaaccacgtcgtcgagatctggagaggccggaaggcagggcggacgcatgttagacggaccggggcttctccagccggatgccgattatcgacgcaccgtcttcatcgggtcgttcatgtcgataccaggcagcgagagctcgaggaggggcagcaggtggcggccgcccgggtagaagacatcgcgcgagaccatcgggcctgcgcaggctgccaggcacgtcaggacggcaggcgtccggtgcgtctaaaagggtgagaactccgagtcagctttcagtacatggagtcagcgaacggacagcggcccggtcaagcaggacagacctcctcgagacccgtcagcgaagggtaggtccggtcaaggatggccggcaccgcaaggctcggctcgagcaggcagaggtagcgcaggcaggcgtgactgtaggacattgtcgtctggtcctgttggcgagtccgggccagaaggggtcagctcgcaagccagagccaccctgatcggaaagaggcgggaccagccttcgagaacatcgaaaggagggcgaccgtccggattgcaacgctgaactcgcgcttcatttcgggcgtcagccggcggtggcggggcgtcttgcacgacggccgctcttcctccttccagcgcgtcacaaagacggcggtcagggcccagatgaaggtcgcgctggcggcgctcgacgagccagcgttctgtcaaggacgcatcgagaagggagtcagcaacccccgaagccaacggacgagggatcggaacgccgacgacgcaccgacggatggaagaagctctcgcaggtgttgatcagcttgacgagcgcgtcgagcgccttgctgccgccgaccgacttggccggcttagcccctggcgctccgataccgctcgccttggcaatcgcaacgccgagcaggccgttcttgggcgtcggcccggctgagctggactgtccggggacaggcgtcgagacgccggagggcaggacggcgggtgagtcgttgaacatcgagtagatgatgaggtgcgcgagtgactctacgggggaggcgcaagtacagagcggcggatcagatgagcctgcacagacgaaggtggtcgaggctgaggaaggacgtacgaatccggtcggtcggcttcgacatgcgctccatcgtcgacgacagcttggcgtccgacgtctggcccgaggcgtgcttggcgccctctggttcatcgtcaccgtcgcctaaggcgtcgagatcagcacgctaagcgaggcgaggaaagagccgagcgggaaagcactcactcatcgaggtcaggcaaatagtcatgatgcccttgaactcttcctctgtgaagatgccgacatcacggctgatcccgcgccaacctaagccgctcgcgccatcaacgtccatctcggccgccgtcatccgctcaggctcgtagccgttgtcgccgagcgcgaccgaatcccgccagcgatgaggatcggcctgctcgccgtctgcggccacctcgccgtcgtcctcatcatcttcgtcatccttattgcgcttctcacggacgtagacatagtctggcgcaagcttagctgggtccgagatgctcgggtcgacgtgaacctcagcgaggcgcgaaaggaggtcgagcatctggtcgtcgaatgtcgccgatgcgatcgactcgccgagcttgaacatcatcggcagccacctttgggggtgcgtcaggggcaagaagtggacgaggaaggcctgggtggcgatgaccgtctgcaaacaggagctcagcgagctgtcagtccgggtgtgcttcccgagaaggagctgaagcgctgcgactgacgttgatgtcgttgccgtccatccggccgaggatttggtcgagcatctcgttcgactcgcgcgggtcaaagaagcgctggcagccctcgcagaggctgaggagcgcgccgctgacgttggtgaggccggtcttgcggccctttggaaagatctcgcgcgagaggatgtcgtagattgggcgccaagggagcaggacgtcggaccggtcgatcaggcttttcttctcgaccagctggaggaccgtcgaagcaaagttctcgacgagccgggcgtccatcccgggcgagacagcgagctcgtagtagagctcgacgagactgacgcgtgtcggccgctgcatcgggtacttcatcgcgagccagcgtccgagctcacgctgccagcgccagaagccgacgtcccagtcgcggaggctgatggcctcggtcagccgggtcaggatgagcgccagccggcggtccatctcggccagcgactcgacctcgtatggcagcgtcgagggcagcgacaggtgcttcagccgcgggtccggcttgccctgcgcaaacggagacggaggagggtcagtaccgggctcgagctcagagggagcggctagcacacagctaatctcgtgcagcaggcggagtcgctctgatcgccgacgtacatcttctccgagcagctcctcatccttcggccctcccttcagccgaccagcagcagcagcagcagcgtccgtcgtcatcgtcgtcgggttcagctcctgctcgtcctccgtgtcgtcctcgacaaagccgtccgggtcactcgtattgtcgctgtcaaagtccttgaactcgtcctcgtccatcgacggtggggaggagcccggggcggagcggcgaggcgatgcctgacgggggtcggcggcggcgcggggatcgaaggggggtggtgtgtgtcgcaatctctttggcaagaaagagtcaaaagttggccttgaagaaggcaggcgagcggctaggagagaccagccaaagagagtgagagtgtgggtgggagcgagacgagagatggtggtgaagggcgagagagccggtcgagctggaacctgcgccgccgcggagcacgagcttcaagccgcgcggcctgcctgttcaacgccacgcctcggaaactcaaatggcggacgaacagctcctggcttcagctgaccggtcgtgcccagacgggacgctagggtaggcgagcgcatcctccaacccagccctgcactccttcggcgcctgtatcgtccctcgcctccacgcgagcgtcctccactggtctggcgcacagctcagccaggcccggtcgaggctatcgttgtacattgagatggagggagagcgtaaaaaggatgtgcgggcgagcgagcgcaacacgcgcgtgcgcgctgttaaggcgaagcggtccgaggcgatgaaaggtgaaaagagaaagggaggggtgcagcttaggccttgacctccttggccttgtcgagcgcggcggcctggatggggttgctgttccgccagctgtcgggtgagagagaaggacaggtcagcgagggtggtccaaccaagacgggcaggtaggcgcaaggcaaagcagggagccgggggcagagtcgatccctcgcaaggtcgcgctggctgcgtggtcaagcagcggcgaccttgcgagggatcgactctgcccccggctccctgctttgccttgcgcctacctgcccgtcttggttggaccaccctcgctgcccccacccccccccccccccccgacgcaggctgatcgaccatgtcccgtacatgaaggcgatccggagtgccgccctcggcggccagacgactggctttgccctcagctgcacggccgtcggctgcccttgggctccgcaactgggcgacgattttgggcggccgaccgacaggctcatccaatgacccctatagttgcactctcctgctcctggctcgtacctcggtcgagccgcctgccgtagtcagcagcgccgggtcgggctcgacatgtgccctacccgacccagaacagggagccctcgttagccgctctttgcccctgatttccaggggcgcgccgacgccgacgtcctgcgcgcgaagtcgatcgccctcaccggccgcgccggtttatagctgctgcctcaacgccctcgaccatcttgcccttctccccttcaccccaacacccacctacttctgtctgtgaacgaccctcatctccatcaatcgatcagcaaacatgccccgtctcgctcacaaggtccgctcctcactcgtggcgtgctctcgtgcaagcgagcgccttgctcgacctcagccttcggcgcgacccgacccgctgacctccgagctcgaccccctctgctctgccctggtctctccctccgccgccttgtctctggcaggtttgcatcatcaccgtacgttctgctttcacctgcctttgtgccctcgtagactgagagcgtcttttgacgatgtgctcgcccccactctgctgtctgctttctcgcttcagggcgctggctccggtatcggcttcgagtcggccctcctcttcgcctcggagggcgcgaccgtcatccttgccgacgtcaacctgtgcgtctctgctcatctcgctcgctgctttgctcgtctcgtcgaagacggcagatggtcgaaatacgacgaggcgccagcgggctgacatttttccctatctcaccctccctccgcctgcgcttgctcccccgtcacccgccttcagcgccgccgtcgagaaggcggccggcatcatcgccgacaagtggcccgaagccaagacgtgggcggtcaagtgtgacgtcagcaaggaggctgacaccaagaacatggtcgacggcacggtcgagcgctttggccggctcgacgtcctcgtgcgtcgccccgtcgccttcggctgcttcaagggtatgcgttgctaacctccgcttccctgtcgcccatctcagttcaacgtgagcctccctcggttaccaaggctgcgatagcaggacaccccgactaactcgctcctgttcgtcacccacagaacgccggcatcatgcaccccgccgatgacaacgcgctcactaccgaggagtctgtctgggacctgactaacacggtcaacgtcaagggcgtctggtggggctgcaagtacggcatcatggccagtgcgttgttgaccagtcagtgagactgcgcctgcaccgtaattgacgctctcgctccctaacctttgcagtgcgcaagaacccgacggacgagtccaaaaacctccgtgtcggaggctccatcatcaatgtcgcctcgttcgtcgccatcctcggcgcggcaacccctcagctcgcttacacggccagcaagggtgccgtcctcgccatgacgcgcgagctcgccgtcgtccacgcccgcgagggcatccgcttcaacgccctctgcccgggcccgatccggacgccgcttctgatggacttcctcgacacggccgagaagaaggagcgccggctgatccacgtcccgatgggccgctttggcgaggccatcgagcaggctcgcggtgccctcttccgtgagtagccgccgagtcggcccctggctgccagagccaagccagctgacacggtcgcaatctccttcttctcctcctgccagtcgcctcggacgactcgtcgttcgtcaccggcaccgacttcaaggtcgacggcggcgtctcggccgcgtacgtcacgccgctcggcgagcaggtcctccctccgccggccggcatgctcgcttagaggagaccgctccttcaaagtcactcgctcaagcgtcgaccaagcgaaacactggcacgcccgagtcgggacggcgacgcgacgaccggcatggaggacagctacgcgcccctgctgacggggcgctcagtaagggagagcacctgcacgcttcgtttgccagacttggttccccgggcgcactgcgtctctcgtaggccgtctcgaacgatgccatgattgtcgtgcctcatcgtcgaccgtccgcgccggaaatcgtagtcggcgcgtcgctcgctcgttcggctcgcgtcgcccgacaagcaaggctgagcagccgccgtcgggcgaaaagtgcgactgcaagcgcgcgatgactccttcgccgcctctccgacgcctcagccccagccagcggaacttgctctcgaaaccatcatcatcaattactcccaacccaattttcccaaccccatctctcagccatgacctcgttcagtatcgaggaccggctccagcggtggtcgagccggctggcgaccgtgccgtcgctggcgctcccaaccgactacccacggccagccccgccgagggtcgtcgaggccgcccagtcggtcgctctcagctcagacgtctcgcaggcgctcgactcgctccaggagcagctcagcgggccgtcggcctaccaggtcctcctgacggcctttatcgtccttcttcatcgatacacgccggatccgtcgctcgtcgtctgcacgtcgttcctgcccgagggcgagtcgacgccggtccagctcttgctgctcatcaacatcgcacccgaggacacgtttgagagcctactcaagcaggtcgtccgggtcgagcaggaagcgcaggccgatgcggcgccgctcaaggagattgagcagacgcttcgcaaggctcagccggagcggggcgagggcccgctcttccgggtcaagttcgtcgacggcgccgttgccaagggcaagcttgagccgatgggcctcgagaccgacctctcgctcgtctttgacggagacgccaggtcgcttgatctcagcgtcaactcgctcctcttcaacccggcccggagccagtaccttctgcaatcgctcctccagcttgtgtcggccgctgctgccgcgccccagggctcgatcctgacgctcccgctccgaacggccgatcaggaggcggtcctgcccgacccgtcggccgacctcgactggtgcggtttcaaaggcgcgatccctcacatttttgccgccaacgcggccgcgcatccggaccggccgtgcgtcattgagtcgtttgaccaggcggccaacgccgacgggccgagtaccggccgcaacgtctttacgtaccggaccgtcgacgaggcctcgaacctcgttgcgcaccggctcctcgcggccggccttcagcggggtgaggtcgtcatgatctacgccggccggcgggtcgagctcgtcgtcgccgtcatgggcgtcctcaaggccggctgcatctttagcgtcatcgacccggcctacccgccttcacgccagactgtctaccttgacgtctcaaacccgagggcgctcatcatcctcgaggaggccggtacgctccatccgaccgtccaggactttgtcgccaactcgctcaagcagccgctgcggctcatcgttcctgccctccggctccagccttcgggacaggcccttggcggtcccgcgctcgacacctcgggtgaggatgtccttgcctcagtcgccaacctcgctggcaagcagactggggtcgtcctcggcccggactcgctcgcgaccctctctttcacgagcggctcgaccggcatccccaagggcgtcaagggccggcactattcgctcacgcactttttcccctggatgggaacgcgcttcggcctcgacagctcggctaagtacacgatgctcagcggcattgcccacgaccctatccagcgtgacagtgcgtcccggcggcgtccgacaaagctgtgctcgtcgctgatccggctcgcccctcttgcgtgcggcagtcttcactccgctcttcctcggcgccgagctgcacgtccccacggcggacgacattggcacgcccggtcgcctggctgagtggatggcccagagcgaggtcacagtcacccacctcacaccaggtacgtcgccgcttgcttaatcttgccagcatccatgttgacgagcgtcctcgtcgtgcagcaatgggccagctgctgtctgcccaagcgacggctcagattcccaagctcaagaacgccttttttgtcggcgacgtcctgaccaagcgcgactgcacgcggctccaggcgctggccgccaatgtccgtatcatcaacatgtacggcacgaccgagacccagcgggccgtctcgtactttgcgattccgcctgtcagcgaagactcaaccttcctctcgacccagaaggatattatgcctgccggccagggcatgatcgacgttcagctgctcgtcgttaaccaggccgaccgcaatgttcggtgcgccgtcggcgaggtcggcgagctctacgtccgctcgggcggcctctccgaaggctaccttgacgagaaggcgacacaggaaaagttcatctataactggttcagccaggacgtcaaccgggccgacacgctccagggctcccccgagggcgagttctggcacggcgtccgtgaccggatgtaccgctcgggcgacctcggccgctacctgccggacggcacggtcgagtgcaccggccgggccgacgaccagatcaaaatccgcggcttccggatcgagctcggcgagatcgacacgcacctcagccggcaccggcacgtccgcgagaacgttacgctcgtccggcgtgacaagaacgaggagaaggttctcgtctcctactttgtgccccaaggcgcggtcggcgagctcgagaccgacatcgaggacgacgaggaggttgaggtcgccggcgagcgccggcgcatgaccgaggtcgagaagggtgtcgtcaagtaccgccggctgattcgcgacatccgcgagcatctcaagaagaagctcgcgagctatgccgtcccgtcgagtgcgtgcactcaattcctcctcgcccgtgtaccgccctgacctcattgagtcgccctccagtctacatccccctcgcgcggatgccgctcaacccgaacggcaagattgataagcccgcgctgcctttccccgacacggcggctctcggctcggtcaggtcggctgcggccaaggtcggcacttctcagaacatgacgccgtcagaggagacgatccacggcatctggatgcggctcctgccgtcagcctcggccccgctgccgctcgacgacagcttctttgacctcggcggccactcgatcctcgccacgcggctcatctttgagatccgcaaggcctttgtccttaacgcccccctcggcatggtcttcgagtcgccgacgattcgtcagcaggctaccgcgatggacgccctccgccagggcgacctcggctttgagaacgccgcggcctcgtcgtcgaccgccggcgccgataagtcggcctcgtctgccgacgactacggcaaggactatgaggtcctgctcaagaagctcgcgccgtcctacgcgcccgcgcccgccggtctcgccgagaagccagtgaccgtcttcctgactggtgcgacgggcttcctcggcgcctttgtcctgcgcgacctgctcgagcgtcggggctcgcgggttgccaaggtcatctgcctcgtccgagccaagtcgagcgagcaggccatggcgcgcctgcgtgagagcggtgaaggtcgggccgtctggagcgaggaatgggtctcgggcggccgggtcgaggccgtcgtcggtgacctggccgacgccaagttcggcctcgacgacgccacctggtcgcgcatcgctgaggaggccgacgtgattgttcacaacggagcgctcgtgcgtcgctcggtgctctccgcagacagtcgtgtctatgacgctgatgcagtctccccctcgccttccgccttccgccttccgccttccgcctccaggtacactgggtgtacggctacgaccgcctgcgggctcccaacacgctttcgacgttgacggcgattgcgcttgcggccgagcaccacaccaagccgctgacgtttgtctcgacgacggcgacggtcgagaaggagcactatgtccgcctctccgagtcgctcgttcagggcggcggcgtcggggtgcccgagtcggacgacctcgaggagggtcggaccggcctcgggaccggctacggccagaccaagtgggtcgccgaaaagattctgcttgaggctggcaagcgtggtctgcccggctgggtggtccgcccgggctatatcgtcggcgactcggagtcggcaggtgcgtctacctactctccgctggcaccgatcggttcgctgacctgaattgcgccaccctcggccggcagttacaaacaccgacgacttcatctggcggctcgtcaagggctcgatccagctcggcctcgtgcccgacatcaacaatgcaatcaacatggtacccgtcgaccaagtcgcgcggattaccggtgtcgccggcgtctcggtcccgccgaccgacgcgtcgccttttgggtcgatgacggtcctccacgttacctcgcggccgcggacgcggtacaacgacttcctgctcccgctcggcgagtcgtacggctataaggtcgagtcgacgccctatctcgagtggcggacgcggctcgagcagcacgtgctcgaggtcggcgacaacgccctcttcccgctcctccactttgtcctcgacgacctgccgacgagcaccaagtcggccgagctcgacgacaccaacactcgggccctcctccaggctgccggcgagcgcgacgccatgaatgtcagcgaagacgtcctcggccgctatctcgcctggctcgtcaaggccggcttccttgatgccccacccgccggcggcaagaaggcgctgcccgagctgaagggcgcggcggtcgccatgggccgcagcagtggcgccatttaatgtcatgagatcatctcgtgcgtgatggtggtaggtctcggtggacgggcacgataggaagagggtccaacgtccagttaggtacggctttcgttcgaaggaagggggtgaggtgagggcgagtgctcctagagcatctcggcctgctcggccggcatcttgtcgtagttgcgccggctggtgcaccctttccagcgcttacagccgcgcaatacttgcctaaagcgtggtcctcggcgtcttaggcgtcgaaacccgagccttgcagagctcgccgtacggcagacagagagcagcgcctgctgcgcaccttcgggggaggcttaccgcagatcgtccatgaggaagctcatgaacctggttctttgctctggagagatagctcctaaaagtaagggagcagccattgacatcactctggaatacaagggcgcaagagtaagagcggtgagcgagtagactaggtgtacagcggtagggagagcgacggagcctcgcaaggctcgccgagcagaaacaaggtggaactagagagcaggacccgggggaatatatgaacagcagcggggcagaggggtgcgcagctaagagacgccgctcaggccatgcggtcggagtgctcaatctcgaggctgcgggccttctcgtccgacttgtcgccgctgctgccgtcgtggtggccgccaatcgtctcgagccggccgttgacgcgaatcttgccctcgcggagctcgcgctcgcggtcttcggcgccagttgggacgtacttggagagggggacgatccagtggctgaaggagaagcgcgcgaggtcagcaaaatgactcgcattagtgctacggtcgagctcaggagtcgagagtaacgtacgtcttggcgaaaaagtcgtccatgtcttcaagggaccgtcccttcgtctcacttcattgaaagggaggaaatgggtcagccatcatgctgaagaggcggtgggcagcaagcgaccaaggagaacgcacgggaagaagcagtagacaaagagcgcattggtgcaggcgcagatcgcaaagaccatgtagtacctacagagagaaggtcgagtcagccaagatgattgccgagaaggttcaggagcttcgcgtaccgccaaccaatcttcttgaacgcgatcggcgtcacttgcgcaatcatgaagttggagatccacgcagacgacgaggtgatggccgtgcccttggcgcgaatcgacgtgttcatgatctcgacggggtaggcccacgagatgggaccgatggcggacgagaaggcaaagttgaactgaagggggcgggcaagcgatcgggggtcagcgtcctgctccccttgtcacaagagcgcgtccgactcacaatccaggtcatcatgacgaaggcgtacgaggccgaggtgttgccggcctcagcagggtagacctgaggcaaggaagagggcgcgtcagccactcagatcgaccggaggcgaggaatggagcaatggagagcaagtctcaccttctgaatggcagtgccgaccgcgaacgtagcgcccgacacaaggttcgcgataatcagtggccagcgacggccgagcttgtcgacgtagaagctggaagggagaagggcagattaggcgccgtcgagtaagagagggagcagggggagacgcacatgcaggccgcctcgccgaagagtgcgatgatcgagttgatcgactggaacaggaaggttttttcggtgccaaagccgatcgaggcgaagatggccggcgagtagtattgaaggacggagacgccagtcatctggagggacggagggaaggcaggtcagcgagacggtctcgtgtggatcggcgatgagaaggataaaggggccggacctggacagagaattgaagagcgacgccgaggaagaccttgcggaagttgttgaggtcgccaaagatctgagacaaggctccccgagtgaggagcgcctcctcggcaacctgggcgcggatctcctcgaactcggcgacgacaaacgtgtcggtcgtgtcgccgcgggcgtgaaggcgggcaagcgaggcaagaccctcctcgtcgcggccgaccttgacgagccagcggggcgactcactgtgaggagaaaggggcggctgagggtcagcagttgatcgtcgcgggggcgcagctgagggtcacgcacgggaagacccagatgaggcaggccagcggaatcgcagggacaatctgaagggcgagggggaagcgccactggaagacggtaccgttgttgtggcgctgtaggccgtagacgacaaagctcgcgatgaaagctgaggggtgagtaagtgtgtcagcctcaaataacgccttgtggagagccggacgcaggcatggcgtacctccgaggccgagggcgaactgctgaagggtggtgaggcgaccgcgaatcgaggggtgggcgatctccgactggtagagcggggcgaggaacgaaagctggccgatggcgagaccggcgaagaagcggccggcgagcatcatctcgccgttctgggcggcagtctgtcgggaggtcggtcggtcagctcgccatgcctgatcaagaacagaggcagaacggagcacacctgaatggcgccgcccatgatgaagatgcacgcgccgacaaagatggccttcttccggccgaacttgtccgcgatgaaggccgaggggaggcaaccctgttgacaagagagcgagtcagcaagggttgggcgtcaaggcagctcgagtctaggacgcaccacaagggcgccgagcaggagcgacgagacgatgaagccgatgtagttctcgtcatccgcacgcgagcccatggtcttgataaagtcggatgcgggaaggacaccggcaataacacctgcaggtacgaccagggagcggtcagccgcgagcagaggggcggacagaaactcgatgagacgaaccgagatcgtatccgaactgttgaacgggcgagttcgggcggtgcgcggcgggttagccgaagagcttcgtctgcaagatcccgcctcgatccagcgacaacgcaccatgaccgagccgagagcgacgaagactccgcagagccaggtgtagagcttcggttccatcttaggcgagcttgaggctgagcccgaggttgaacacgaggtgaagaaagaggtgagttcgggctcgagaggtggaggtgtcgaccggcggagatgagcgaggtctgaagcgcgaacgattgaggtcagcctggagcacaagagggtcggagggagggggctcgcggccgaacctcttggtcgagagcaggagaggaagagtgtgggtggcgtggaggaagagagaagccgaccgacggacggccttccttaagaaaggggagggaccccgccgtcagtgtctcgtgtggtccggcgagggaagacgtttgacccggcgccgagcctaagacggaggagcgactgagcggccgtcgagtgcgcctctgcagggggcggccgaccaaacacctcaccaggcgcacgagccagcagcgggcgatcgcagcaggacctgacggcgagggccagaccgaaacggcccgagcagcggcagcggaacggcgatgcgcgagctggcctgatgctgttggccggaggggacgcgacgcgatcgcctgagaggcgaggtcgtcaaccgggcgggcgagccaagggtcgacgtcgctgcgccaggcgcgttcaagacggcgcagggccgggcgacgcgttgatctccggccaggacgacaggacggcgtcgccagccagcccgatcaaggcagcagagcgcgtccattagcagagagacctgcagatctccccccttcgagggcgagctgctgacttgtcgagacgatgagtcgtgcgagtcgtatgtcgagcctgaacgtggcaccgcccgcgagcgcggccagccagagagagcagcgacgtcggtggaggaggagggagcggcagccagcatccaccccttcctcagccatcctgctgccttcgtcagcgtgcgtccacttcgtgaagtcttgggtcgtgctgggatcagctcgagctgactgttcagctggtgcgcgtcggtggccggcgttggcagcttgtcttccgagctccccgtcctctcctcgaaaccctggcaacgaccggtccccgacagcccgcctcgaatcgctacatgccgccaagagcagcgtgctctgcggccttcgctcgtctcactcgaccttctgctagctctggaagcctcgccaggctctctcgcacacctgccgcctcctcgcccctcggcgagctcctgcgctcgtttggctcgacgccagaagcacgacgtcaccgtttcacgcccttgccaaccaaggcgccgctctcgggcgctctcccatcgaaggatgttgacggcaaggtggctgccgcccgggcccagtatgaggaggtcattcacaagtacgctgtcagcggcgcccgacgcgacggcgagctcgtcctccgatgtgcgtttcgccccgctgccgctcgtcctgcagctgccgtccctggagcctggagctgaccatcagcaccttttaggcacgatattcgacaaggatggcaaggtcagccggcagcagttcaagaaatcggacctctgctcggcccacgggctcgatgtgcgtccctcgccgcgtaacgccctgcgcagcctgaggtagctgccatactcacgcgctctccgccttgcatcctttcgacagccgagagacctgcgcagggtcgactcggcgacgcccaaccttgtgccaaccatcatcgtccgccagcacgcgatcttggccactgtcctccacatccgcgctctcatcaaggccgacacggtgatcgtctttgacgtcgtcggcagcaaggactcacggctccagtctggattcgtagaccacctcgtcgtgagtcgcaacattctactgagtgggacggtcgccggctccagacgcctgactcagacgacatgaccgcaacagaacaatctcaagatgcggcagacgacgatcccctacgaattccggtgcgccggctgtctgctttatctgctgctgctggtaagaggagaagctgacaggccactctcacagagccgtcgagtcggtgctcgtctcggtctgcggcgcgctggaggccgaactgacgtacactcggtgcgtccagctcgtcacgaccacactcgcccgagtccggttctgacacaaaagatcctctgcgtacgcccctcttcgcagaaagatcgttaacgacctcttgcttgagctcgaggacaacctgagccgggagaagctgcggagcttgctgcaccactcgcggcggctgacgggcttcaataaccgagcaacgggcgtcatggatgcgatcgaagaggttcttgagaacggtacgtgccgtcagcaggccgagccgtgcttgaccgcggccgctgacaggatgacctctgcacgtacgcagatgaggacatgtcggagatgtacctctcggagaagctgagccaaacgccgggcgaggagcgcgacatcaaggaccacaccgaggtcgagatcctgctcgagagtgttcagaagcaggtcgaggagattgtcaatgaggtcgagacgacgatcgtgcgtgacttgaagtcacgcgcacctttccgcacacgctgcacgacgctgacggtcgctttccttctttggcgcaggcaaacgtcgcgtccacgcaggagattgtcgagctgatgctcgacgcgaaccgcaacaagctgctcgcgctcgatctgaaggtgtgtccgaggatggagacgccgtccaatggcaatggcccacgagctgaacactctgtgccgctactgcaggtctcgatcatgacgcttggcgtcggctcggccgctctcctcgccggtctcggcggcatgaacgtgagtggccgcgagacgacggcctcggttgcccgcgctcatgctgacccatcctcttggccccccagctgcaaaatcacttcgagacgcacccaaacatgttctactacatttcgtcgctcgccgtcacgctcgccgtcatctcgtcgatgatcggcctccgacacctccgcaaggtgatgcggatcggcctcgccgacagcgactcggccgcccaggcaagctaccgctggctcgacaccgtcggccggccagccggcgccggtctcattggaaagtcggtaacggagcgcgcgacagtcatccctgcggccggctcgagcgtcggcaacggcatcagctcgctcgatggcaccgctggcgcctcggctaagctcaaggcttcgcgcggcggggtccggaagccgctctgaccgacctctttttgcctgtattcccttttgcaccggccgccctcatgcaccggccgacggccccttctctgttgtatcctcttcctccctttagagcgcagtgcccgcgagatgtgatgaaccccctcccccctcgaagcgcggtcagagtccttgcgaggggacgacgctggacgggcgcaggtgccgcgtgatcgtcgcgtcgcacagcacgcatcgaagccagcttcgatctgcccgcagaggagagatccggacgcgtttgcggccgtcgccgtgttggccgcaggctggcagcagggttgggcagggcctggctggctgcgctgctgctgttgcttggcaacaaggaacgaggttcgcccgctctagcgaaggccgtcgaagcggtcgaggcagcggcggcgcgccggcctttaccagccgactctccaacttgccggttcacctctatcctcgacctccccatccttaccctaccaatccttcttacttcctcgcaccgctactatggctggagtcaacccttacgcgtccgcccccaagacgggtgccgaggccgccgtcgaggcgcccaaggacctgcacccggccgcgctgcccaaggtcgcgctctcgctcaacccgaaccatctcgcctcgggttagtccgcgtcgagaagcctgagctctggctggcagctgatcagggcgctcgtcctctcgcagaccacatcgtctcggacaagctctacagcggctttgtcgagcacctcggccgtggcatgtcggtcctcttcttccctcgccggcgcggtcggcccgcgtgggccgccgtgctcgcgcagcagcctcctcctaaatgttctcatcttgctgaagctctgtctcgctgctcctccagctacggcggcatcgttgacaacccggccgcgccgagcccagagaacctcctgatcgagcagaagtccaagattgccggcgccctcggctggcggaaggacgtgatggacgtcattggcaagaagggcgacctcgagatgcctatgcttcggttcgtctctgggctcgctacagaggtgtcgcttcccttcgtggctgactgtctgccctcttcttctcgctcagctggcctggaggaagtacgtccggagcctctttgcccgtcgcatcctccagccgctgagctgacacctcacccctcgacctcctcccctcgcgatcagactttgtcagcaactaccactggcaggacggcattggtcctatcgagaaccggccggtccggaccgagctcgcctggctgtcgaccgagtccaacaagtttggcacggacgagttcatcgactacgcccgcgcgctcggcgttgagccctacctctgcctcaacagtgcgcctccttctccacgcttgatccaaaggtcgtcagctgaccctccgccgtcgtatcacagtgggcacaggcacgtatgaggaggctctcgcttggctcgagtactgcaacggcactggcgacacctactgggccaacctccgacgcaagaacactggccggcacgagccgcacaacgtcaagctctggggcctcggcaacgagatgcacggcgcctggcaggtcggcgctctctcggccaccgactatgccaagaaggcctaccgctgggcgcacggcctccggctcgtcgacccctcaatccagctcgtgtcgtgcggcaaccaggttcgtctaccctgcggcgcgagtctgcccttccagtctagaagcctccgactgacgctcgtcactcgttcctcctgcagggcaactcggagtgggaccgcgaggtccttcagaagctgatctcggtcgtcgacttccactcgatccacttttagtgcgtcggccgactcttggaagctggcgaggcttcactgacgccagagtctcctcgactgttcctcagttccatgctcggctaccagcacgagctcaacgccaccaaccagggcctgtcgtacgagaagaacgtctttggtccggcggtcagtcgcacggtgtctctcgatcgacagctggcacgacaatggctgactctagagtctcgcgcttatttcgtaggctgctgagcggggcatcgagatctgccagtcgctcatcgacctcgccaagattgagcaggcgcccaagggtgacagctcgctcgccgcccgtgacgttaagatttgctacgagtgcgtctctccagcgactgtcttctgccagactgccctgaccatctatccctttacgatcgcagcgagtggaacgtctgggacgaggttaaggcgcccggctcaaacggcctcgagcagttctacgactttaccgacatgctcggcgtcgccggctggctcaacattctcgtccgcaagagctacgacgtcggcattgcctgcatcgcccagagcgttaacgtcatttcgcccctcatgacgagccccgacggcctcctcttccagacgacctacttcccgtgcgtcccgtctcgtcgcgtcccgcagcccgtcaccctccgctgactcttgccgtccaccaacaggctcaagatgttctcgcgctacatgaaggacggccacgtcctgtcgctgccttccgtctcgcccgcctagttcgtccgtttcgcacgccacgattgagcgatcatcacgctgaccgccgccgcacgttcctccgcctcccagcaaaggcccgacgtacccgctctgggtccagcacctcgccgccccggcctacgtcgacacagttgccgtcgcaaaggacctcggtgccggcaagaagagcgtccggctgagtgtcatcaaccgccacccgagcgcggcctgggagggcggctttgccttctccgactttggtgcgccgctggcagacactccttcgcctctaagtgcctgctaacctcctgcgtcccgcgttccagaggttgagacggtcgagatccacgagatgtactcggacaacctgacggctaaggtgcgaccgtcgcgagtgaccgcttgagcgtgcgcatggactgaccgccctccctacctcgacagaacacgttcgagaacccgaccgtctgcacgccgaccgttcacaagttcagcgccaaggagtgggagcagaaggctggctcgtgggccgtccggcagcactcgtggcagttcctcatctttgacggcaaggcgctctgagccttttctgtcccctctctccttcccttgggccctcctgcgatagaccgtagcttagatgcctggacgctcctcttttgtatgatgacctgtgcctcgtgtcccgtcgccgcaagactgagagccgccgccgtcgacatgtggaggcagtcgggacgacgaccgcttacgccccgagcgtaacgcaggtcacggccgacgacagcgacgacgcgcgcgggcgcctccagcgagctcgtccgcctcatctcgtcgaacatccacccatcctcccaccacctcgttccttctccctgcccatgtcgttcgtagcagtccagtcgcaacccggcggcggagatatcaagtcgtattacacggccaagattgaggctgccgagctctcgatcaaccgcaagacgcagaacctccgccggctcgaggcccagcggaatgctctcaacgcccggggtgcgtctccccttgcgaagggctcgaggaggatgcgcgaggagagtcgcggtcggccgcctacagtcttggctgacccagcttggatcgttgctcgcctgtcgcagtccgcctgctgcgagaggagctccagctgctgcaggagcccgggtcgtacgtcggcgaggtcatcaaggtgatgggcaagacgaaggtgctcgtcaaggtccagccagaaggcaaatacggtcagtccttgtgcgcttcctgcagctgatggaggccctcgagctgacgccgtcctcacctcgccaccagtcgtcgacctcgcgcccgacatcgacattgcgaccctaacgcccaacctccgggtcgcactccggtccgactcgtacaagctgcacaaggtcctgcccaacaagattgacccgctcgtctcgctcatgatggttgagaaggtgcccgactcgacgtacgagatggtcggcggtctcgacaagcagatcaaggaggtcaaggaggtgattgagctcccgattaagcacccagagctcttcgagtcgctcggcatcgcccagcccaagggcgtcctgctctacggcccgccgggtaccggcaagacgctcctcgcccgggcagtcgctcaccacaccgactgccgcttcatccgcgtctcgggctcggagctcgttcagaagtacattggcgagggatcgcgcatggtccgcgagctgttcgtcatggcgcgcgagcatgcgccgagcatcatctttatggacgagattgactcgatcggcagctcgagaggcggcggcggcggcgactcggaggtccagcggactatgctcgagctcctcaaccagctcgacggcttcgagccgaccaagaacatcaaagtgagtctcgctcggcggcccgtcccgtcaggtcggcgactgacgctcgcatacttctcctctctgctaggtcatcatggccaccaaccgcatagacatcctcgactcggcgctcctccggccaggccgcatcgaccgcaagatcgagttcccgccgccagggcccgaggcccgtatctcaatcctccgtatccattcgcgcaagatgagcctccagcgagggatcaacttccgctcgctcgccgagaagatgggcaattgctccggtgccgaggtccgcggtatctgtaccgaggccggtgcgtgcccctcgacacgaaagtctgctttgcgagcggctcaactgacccctttcttctcgcgtcacgcaggcatgtacgcgctgcgcgagcgccgaatccacgtcggcggcgaggactttgagatggccatcgccaaggtcctcaagaagaacgccgagggcagcacgtcggtcggcaagctcttctcataggcggcgttggatcctgtcccgcgtcggctgtcatgcggcgggttggatgcacatgtcccctttttaccggttgttaggcgagcgctcgtgtcgcatctgcattgctgagcttgccctcgcttgagtcgactaaggcttggacaggtctccaacggtgactagatgctgcactgagtcggagcgtcctacttgccaactgtgctacattatcacagcccaaggagatggcctgctctgaagaagaaggccgagatccgtgcgctggacagtctgtcagcgaccgttcaggcctctcaaggggcgtcgaagctggtcgaaggcgtgggctcgtgctggcctgacgcgcagcactctaggcccgacagggagggttgccccgcgctcgcccccttcgtcgccttccctctcaaccgccacctcgttctcttctcagccctgtgacctcggccggaccaagcttagagtgagctggccttgctgccttctaccccggcatctcgcgacgctgaccagtcgtgctactcgtcatgctactcgccgtcctgccgcccggcctcgcagactcgactgcggccgacgccccgtcaaccctctcagctcgaccttctcgctgtccagtactgtgagtccgccacgttgcagcgcctcctcaagtaaactagatcagcccgtgctgaccctgcgacccctgcttcctggtcctcctgacgcctcgcgccttgtttcatcccggccgggctgcgatgcccgcccctttctttagtcgcctgtctagacggccgccatctgctcgaccagttcggccctctcctctgcaagccagtcagccatctctccgaactctgatttctcgagcctgacgttgcccccttcctatcctcttggggtagagccgcttcgcaatgccgcccacgccgacgccgacaccgaccgagtcggagtacaagatcttccatgatccggccaacaacatcctgctctgctcggtcggcgacaacgtcaccttcccgttccggaagctccatctcgagtcggcctcggaggattttgagggcatgctcgacggcgggcatgagggtccgcgcaagaggcagggcagcagcccaacgtccgccctcgaggttgtcgacctcgcagaggattcggccgtgctggaagaccacctcgttttcctgcacccacggacgggcgaaccagacctcgagtcgaacgaggagctcgagcagtctgtttttgcgccgagcactgaagatggaggccgagctgatcgcgtctttctctcttcttgccgtcaggctcgtcaacgttgccgacaagtacgcgaccaggacggcgcttcatgctatcctagcccagggcggtcgattccttcgtcgacacgccctggccctctttgctctcgctatcattcgcgagccgcccatgctcgctgcccttgcccttcgggccttcggtagcagcgagggtgacaaccggcccggcttcgtgatcactgatatcccggtcgagctctgggcgcgtcttccggcccacgtcacgatttacttgtgcatgcggcaaatggagatacttgatacagcatgcgaccgtacctctttcaaatacgacgcaaaggattccgaagacatgcgtaggaaggcgccttcctgtcccctctcatgacctccccgcgcgagcgactcttactgattggccttcacagaacccagctgactttgccgatgacaaagtaagcatgttgaacgtcgtcaaggaatatcaggactgagtgatgcctgttctgagagctgtcgtgactgcgaacttcgcgcagacctactaatcacagaaaccgactcatgagtaacgtcacgtcgacgagctgagcgcaaggcaccctgtcgtcctcattgctatccgtgatgaccactcatatcgacttcccccttgccgaggaccgcgagaatcagggagcttcgactgcgccctcgccccacgcacaagcagaggcacggcgggcagctattcgcaaatgctgtggaaacgagaaatcgcatgcagagcaatcgtcatttgagactcgaatcggttcaggacgtcaaacgaaagagagcgagcggaagggccaacaaggtcgcctcggcgtcaggttcggtgcggctgccagtgtcgactgagggcgagatcaagcgcgtcgtcgtcaaacgaatgaccgagtaggtcgagagggtcgtccgcatctccatcggctgccgtgccgtcgctcgtcgcgtccgagcagaacgagtcgccgaggccgggcgtcatcgagcggtcgtcctcgtcaaagctcgagcagcgctccaagctagcgtccagagcagcgaggcggtcgacaggagctggaaggcctgcggcgtcgaacgtggggtcgtcgggagtgtcgagcgcgggtgggaagtcgtcgagggcagcgggagccatatcgatcggcgtgaggggctcgacgccaaagtggttcgtcatctggctctcgaacgaccggtaggggtcgatcggatcggatccgtgccagtcggtgtcgacgagcaagtcgccaggctgcggcaggtcgaggtcgttgtgagcaccgtcgaagggagggaacgagctgtcgcagtctggcggcaggccgtcgaacgagcgcgagacgtccatctcgaagtcggctaggcgagtctgccggaaggcgtcgtcgctcgccgccaaggtcctctcgtcaaagagcctgtcggaaccggcggctacaggtcggaaggccagtgtgggcggcaggtagagcagcgcgttgacgtcgaggctcgggtgcgggctagacgaacgaggacgagtaagaccggcggcggaatgaacggctggagagacagcgcgactcgaagttgggcgccgcaagtgaggcgagccgatcgaaaagtgacgctcgtcggactgctgttggtcgtgggcatcgggaaacggaggctggtgcttgccatcgtccgttgactcggcgccagcaattcgccctctcacctctgcctctgcctctgcctcgttcgtgtccggccaggacatcgagtacaccctttgggtcggcgagccgccctgctccgcgcccgcactgcctggcgacgagccgcgaggcggcgcgacagcctctacgacaccgcatccgtcgccgtcgccgtcggccttcgcagaccgaaagaagcgcgagacggctgccgactgcgctgagggctgcggccgcgttgcgaccgtcacagtcgtcttctgctgctgctttgcgaccggccgcactcgtttcgatgctgtcggagaggagctctgcgctgacgcagggcgacgagcgggagatggccgaacattggagctcgcagcggtcgacggcgatgacgacgagtcagagcgcaggtcgacgggcgacaagctcttgaggcgtgatttgctcgaggtcggccgagcccggttgagaaagtcgcgctcagagaagacgaggtccgggactgctcatcgacggcacgatgggtcggcgcgggacggaggtcagagagcagtcagcccgcggggaggctgcagggttgacgcaccgccccggacccgagcgcccttctttggggcgacctttgacgaggcgacgcccttgttgaagacgcccggccgagcgccatcgcggcgacgcagctgtagacggcaaaggcagacgtcagcagccagacgaggtggatagaggtcacagctggcgacgacgcacagtcaggcgaccgtcaacgacgttggtcgctttgaacgtgtcgagcgggccgaggccgagccgcttcgactctcgctccgaggccgccgtcttgcgcgcgctgcccttgaccgcccgcgtcttcgctgcgttggacctgcgggtaccttttccagcgcccttcgcaccacctccagcgtcggcactcgggcgtgagcgcttcctcggccgccggtcgatctccgagtcgccgtcgtcagacgagcgaccgtccacgacgatcatgctgccctcgctctcggccaccgccgccggcttgggctcgactattgccgccttggcctgccgacgttggcgccgctcttcaagaactgtcgacaagaaggtgcggggaagcagcaggaaggtcagcgcagccctcgggaacggagctcgagctaggcgaaccgagaccgcagactcacgcgctgcccgctgtatctcgccactgtcgtcggcgatggcatcttccgcatgcgaggcgccctggaccttgaccggcttcgcagaggataccttgctctcggccgtcgcttcatcagcggcgtttcgagggcgctcaaccttggggtgggcggcaggctccgcgcaagacgacgcatcgacgggttagcgtcggttctcgtagacgactagacagaggatgctgcttcaggctcacctcgactttgacgtcgggcgcctggccgctccgagctcggcgcagctcggccctcgtctggatgaatgaaccctcgcgcgctcgagctgcagcctcgacagccggctgctccggcgagggctccgcggtaccgactgctgggcgcttggcattcgacgacgtccggatggccgccatgttgccggtcgcagccgtgccgttgcggcccttcatgcggtcgacgagccggcctgccgtcgtcggcgcagctgttggcccagcaggcaccggtttggggccgctcgagctacgcgactcgccagcccgagctgcattgaggacgtcgacaccgctcacccctcccgcgccgagcagcggatgcggagcaggtggcgatgaaggctgctgctgctgctgctgctgctgctggcgggggtcgtcatctgctcgaagcgcgatggcggcgaggtccgagctaccgctgcgcgcgcgcgaatcgccgcctccgccgccagcaagtcccgcctgccggggctgggccgagaggtacgagttgaggagggccgcgccctgggtcgcatacagcgggaggttggacgcctgcgcttggacgaaggcgagcacgtgcggaggagtctccatcgcgtgaggaggagacaggtggaggggctggagtaaccggagatgcgatggggtcgagctgtgctgggatgacgaggttgagcttgtcaggatgagcggcagcggggtggatgcgatgccgtgccgtggggctcgctgttcttggttgctgtcgatgctcgtcgtcgtcgtcgtcgtcgtcgagggagaacgaggcctgtgccttcggcggctgctgcggggccgcgtcgcgtctccgtcgagttgtgcgtacgaaccgacggtgggtgcacttgatgccttggccagaaactttcgcatatacgccgcttcatcagcgtccatttctagagctcgtgcgaaccatcagcatcctttgctgcgagttgggtggtgtgcgctgcagctgacgacctgcgcccttgcgcttcgaccctctcctttgcccctttcgatgaccggagccctccctggttataggatgtaatggagcacagacagcatacgtggacgtcagccggctacgatatgagcaacctagattaagtgttgtgggaaggttgggcgacgagcgggcgtaggacgggaggagagggggcgccgtcggctgtccgaccacggcgccttttgcgcgagatgccttgagcagcgtcaggatccccacgtccgcctcgagggctgtcacaggagggcgttcgaaaacaagcagcgttgctgtcatccgcctctccattcacggttcgcctaaagagtcatcttctggcgcaaggaatcctgaggcggcggctgttgttgagggtcggttttaggctcggctgggcaaacgagttacgaccggcgaatctttatggccgagacccgcggctcgaggttacgctgctcgttacgcgcctgcgccggcagcctgcgcgcgcaggacgacttctgggctcgcggcctccctcccgacccctcgtctcgaccaaccctctcaagaaatctgttggtcccttgctccctccctctaggccaggcagcagcagcagcagaacgaagtggaccctgaaggagcgctcctcgagcgagttacgagcggtcctcgggcggtcgtccaggcaggcagaagctcgagccggcgaagctcagtcagccggagcttgtcctccactcggagggtcggccgggctgactgatgaggtgtccgggaggagggagaggcgggctgcttctgctgccttggttacgccggcctctacccttcatctactgaccaccacccactcacccctccccctcctcaccaactctcctcccctgccaaccagttcaagatgggacgccgccccgcgaagtgctaccgtgcgtgctctcccctgcttggctcgggccactcgacgctcggccatccgactctcagctactagcagccggctgacgacgagcccgttcccctccctcgccaccaggctactgcaagaacaagccgttcccgaagtcgcgcttcaaccgtgccgttccggaccccaaggtgcgacctgcctgccttgcggttgcctgatcgagcttggccgtcggcgacctggctgctgacgcagcacccctttcctttgctctcgctcagatccgcatctatgacctcggtcgcaagaaggcgtcggtgaacgacttccccttctgctgccacctcgtctctgacgagtacgagcaggtctcgtcggaggccctcgaggccgcccgtatttgcgccaacaagtacatcgtcaagacgtctggcaaggagtcgttccacatgcgcatccgtgcccaccccttccacgtcgtccgctgcaacaagactctctcgtgcgccggagcggaccggctgtcgcagggtatgcgtggcgcgtggggtaagccctacggcaaggtcgcccgtgtcaacattggccagcccctcatctcgatccgctgcaaggacgtccacaagccggtcatcatggaggctctccgccgtgcccggtacaagttccccggacgccagaagatcattgtctcgaagaaggtgcgtctgccgggtcctgcgtgcgtgcgcgcgcgtcgcaccctgctgaccccaaagtccttctcttacagtggggcttcaccccggtcaaccggcccgagtacgaggccctccgcgccgagaagaaggtcatcgaggacggtgcctacgtccagttcctccgtcccaagggcaagctcctcgagaacctccagaccgctctccgcgcctaattgcgagctgtcgcctgccttgttgccctttgccatcgcatgacacccgcgttctcatctcgattacccgtcgtctgtcgcgctcagacaaatgagagggcagagcatgctggagttagggagcggcgcaagggccattgatagcggagggcgtgggcgggctgcgagaggaacatctgggcggccactggcgcatgctgcgctcgaccgagacgcatgagcgggcccgagagaatggtcgtccagacaggagatggacccgcaagtctgaagcgtggtcgatgagtggactcgcttggacttcagcggctgcgacggcgaacggccgcgcaacgcgagagccgtcgtcggtcagcactggtgagctagcgagtcagagcgtagcagtgacccacgtctaccggaagacttgctggagcggcagagcggtgagatgatggtcaagggggaggaggccggcagccaacctgctcttgcgggcgaagctagtgctgcgcctcaccttggccatgcgtcgttgccggctgacggcgaggcactttccttcgtcacgtcgaggcgtcttcctcttcttccacgacgtagcatctgaaggcatggagcgactcgtcatgaatcgtcggctgctggccgatggccgccgacgtcgacgccgagcagcaggttgtcgatcaggcggacgccgttgcagcgcatggccccggcaagaacccagccctctcctccgtcggcctgatgcagacattcgtctgctgcaggagggctgaaggtcgatgggtggaagacctcgacatactcggcctgaacaaggccggccgtctgggcctcctcggcctcgatgacggcaagtgccgcctggcgcatctcggcggccgtcgaaccctcgtctgaagcccagagtgcctgagcggctgagagagcccggaagagtgtcggtgcggcggcgagaccggcgggcgagaggtaggcgttgcgcgaggagagggcgagcgaggctggcggcggcgagcgcgtcgtcggatggatgacgaggttcgtcgccgagggcagcgacatgtgcaggtctctcagcactggaggcgagtgaggtcatcgaagagagaatgcgagatcatggtcagcatgggccgagcggctgcccccttgatcgcgagtgacgcactgatcctcagcaagagcgcctgctggatgtccttctgcccgaaatgggcaacgtccggctggacgatgttgaatagcttgctgacgacggtcgcgacgccgcggaagaagttgggtctcgtcttgccctcactgcgaggcgcaatcggtgaagagacggcgcgtcagcgcgatgcaaggacagcgacgaagagtcacaagcctactcacaggacgtcgccgaaccccttgacctcgacgaacgtccctctctgatcggcccggaccgtagtaattccgttagggtacatctcgcggacgtctgggcagaagacgacgagcgggctctcgtcctgctcggcatgctcggtcgcgctcgtctcctgggcagcaacagtcggtggctgaagggcagcaacgccggccgcaagttcagttgacggaggtagaagcgactcgagaagcaagaggtcctgtgggaggttgcgcgggtacgtcgccaggtcctcggtcggggcaaactgcgaagggttgacgaagatcgagaggacggtgagcggcgagcgggccatgctctgcgacactggagaagggaggtacagcatgggcaggcgtcagctcgagacaggcgataccttgagagcagcaggcagagggaagagggaacgaaccgaggtcgagatggccctggtggagactgcgcggaggggttgagtcgggtcagcgcttgagctcagcggctgagaacctagtaggcgagaagcaagccggatctgacgagcgctgcactcacgagcccatcgtcggtacgaagccgacctccttcctggccctgctcgccctcgccctccaggctcggatctgctggaccgaggtgaagaccgggatccgcgaggcccttacgagcgaccggagcgaggcggctgacgacggcggcatggccgggagggtcgaggtggcgggctcaagcgcgacgagtggccggcaagtgaggactgatgtgagctctttatctgctcgagcgttttatccaggcggtcgacgtgattcgaggtggttgtcggccggcagacgagaggacgaagctcgattgaagctcgacccttcttttcggagcggctgtgaaacgcgcgtgaaaggggttcgagcttcgagcttcgcctcttggacctcgacctcggccctctccgcctctacagcacgacggtggacgcgctctgcgatggctgaagacgacaaggaggccgcccgctgggctaccttcacgtccttcctctcgtccgacgacgaggccgaccgcaagccggccgcacctcccctggacgagtttgccggcgctcggccctctgcatcattcctggtgcccaccttggcaggcagctcacgccagccatctggccgtcggtccatctatccgccggtcgacatcggctcgcttggtcctgctgctcctagtgctggctcggcaggtagcctggcagggctcgggccgccctcacgcatcaagccggagctaatggccggcaggtcgacgtcggccatcgccacgccagccggtcaccggcttcccatcaagcccaagcagcacgaagaagacgaggacgagatcgagatcatcggcgagtcgtcgcgggccggtcggtcgagctcgacctcgcaggcgcaagatgctgccgccgctgcggaccaccgtgcccgtcgaaccacgaaggtcgaaggcatgcgtgccgggaacgacctcgagatcatggaggtcggccctgatcagcctgtgaccggtccctcacggacgagcggcggtggcgacttccgccagagccaagccgagcggcagaaggcctttggcaagctcgccgcgctcgacagcgaggtacgctccgggcccctacgttcctgtcactgctcgcgctgactgctctcgctcgtcacttgcgtcagatcacatcggtcgagaatcagctcgaagggctccagcagctgctccagtcgctttacagcgagcgcgagtgcctggccgactcgcttaccggcccagccggccgcgggcctacgaaccgccaggtggcctcggtcggagggacgagcggcggctcgggcccctcaggccacggcagcgccgcgaccgactacaacgttagctcattcgagtggagcggcgagctcctgcagacggccaaggacatttttggcatcggcgctttccggctctgccaggaggggtatgtaaagccgtcgatcgaccggctgagaggctcggcactgacttgcttggcttgtcgacagcatttgcaacgctgcgatggacgcccgcgacgtcgtcgccatcatgccgactggcggaggcaagtcgctctgctaccagctgccggcgctcctcagccggggcacgacgctcgtcatttcgcctctgctgtcgctgatcaccggtgcatctgatttcgagcttcaagccataattctacctcgccctagctgactatcgttctgcaactgacgctctccagaccagattctgcaccttgagggccagggcatcgcctgcgcccagctcacaagcacggtcgaccagaccgagcagcgccgcctcatcaagcgcctcgtcgccgacatcggccaggatccggctctggccggcttccgctattggggcaagaaaaagggcggcaagcagcagcagaacggcgggggggagggtggtagggactcggctccgtcccagttgctgcccttccagttcggcgtcggctccagcggcggtacagagcccatcacgcgcgcgctcgagcgggccctcgatggcaacctccccaagccgttcacccacgtcacctcactcgactttgccaacgccttcaactcgctcgaccgtcggtcgctcgccaaggccctgtcgcagcatgctccggccctctaccgcgctggtcgctgggcgtacgacacgccgacgccgctgttcgtctccgacgccgacggctcggtcaccgcgctcgagtctagccagggcgtccgtcaaggcgaccctctcggcccgcttctgttctcgctcggcatccgcaacaccgtcgaggcccttcaggccgacctcggcgactcgcacgccgttctcgcctacctcgacgacatctacgtgctctcgaccgaggccggagcgctcgagtcggtcattgccttcctcgacggcaacgacgccggcctgtcgctcaacgtcgccaaatgccaggagtcgtcgcttacctcggttgccgccaacggcctcgaggtcctcgggacttgtatcggccctcctgacgttcgcgctgccttcctcgaccggcgcatcgccgaccagctgccggccatcgaccggctcgccgacctgccgcctcaggaggccctcttactgctccgccaatgcttgcaggccaacctccggcaccttcagcgctcgcttcgaacggacgaccttgactcaccctggctcacgctcgacaacgcgctgctcgagcggctgctcctcatccgcggctcacctcgtcgtttggcatcggacgccggcctcgcgacgctgcctgctcgcctcggaggcatgggcctactgtcgcacgccgagtgctcgccgcacgcccgggccgccatggccgagtctgccgacctgctcgtcgacgctgccctctccccggccgacgaccccgacccggacgcggcccccgtcatcgtctcccagcgcgctcgctgccaagccgccttcgccacccgtcgcgaggctctactctgtgcgttgcctgcgtcctctgccaccaccatccttgacaactcctccccggtggcaagacgctggcttgctgtgatcccctttggccctgctctccgtctctcggcgtccgaggtcgccgccggcctacacgtccggacgctctgccccggcaaggacgacgcctgtgccctctgcgcccagcccaatgacctcggccatgacgaggtctgcggcgctcgcccgctctggcgcatcgctcggcacgagcaggtcaaagctctccttgccaagcacctcaagtcgatcgccggcacgacggtcaagctcgagccgttcgtcccgggctcgcacctccggaccgacttgcgcattgccggcacggcctcgtacaacggcccgctgtccgagttcgacgtctcggtcgtggcggcggcaaccttgggcggtcgtcggccccctcccgcttctctttttctctctgctgctgcctctgcctctgccacctcctccctgccctcgctcgacgcctccctccctgccgctgccctcgccacctccagccttctcgtccccctcaccctggtcgagaacgagaagcggtccaagtacctcggtcgcaccgccacccctttcttccctctcgttctctctaccgccggcaccctctcccccgcctccgtcctccttttcgaccactggcgcgccctcatgccgtcgtacgatctcttctcccgcctgctctctctgtcacttctccgggcgcgtgctcgcttcttcgccttctaaattgcgctccctacctccgcctccgtctcctcccctcgtccagctctcgaactcctcgcctcctgtccatagacctgcctttgtcattgcatgcccgttacaccctaacccttcacttccgcttccgtgtgcccgcttccctcttccgtagttcgtccctccgcctctgtcttccccctctcgacgaccccctcttccgtccactttccctctaggcagccaacccgaccctaccccgttcgtctctgtccccatcccgcctctccttgaccctgccttacactattcgatgctgcagtaaccctacaccaggcaacccgacccgaccttaaccctctccgggttcggagctcgctcgccacaggggtacggtcagacccgtcggtcgagcctcgccagccatggctaccaagcggggccggtgccctcgctgtcgcacagagtacgccgacctgtgggatcatctggtcaaacgacacaaggacatcagctggtccgacaccgacctccgagggacgtctctcctcgcttgcccttgtggagccgtcgcccgctccgttcatggcctcaagtcccaccagggcaaggtcaagtgcatcggccttcaccagcgtcaggccatcccagtcgaacctcggccggccctccagcggtttgctcgtgcccccgtcgttccggttggccgtcacgccgcttcggccagctcggtcgcccctctctcggtcgcctcgtccttcagtgcgacctcagacctggagctcgagcctgtcgttcgtcgtgcctctactccagttcgtcgtgcctcggtgtcagtcgcacccgaagtcatcctgctctcgccgtcgtcgtcggctcaggtcacacccgttcgccctcgtcgctcgtctgctccttctacgctagtcgactggcgcgacatctcatcgtccgattccgatcgcggcaccctgtcgtctgagcgtgacgaccccatacccggctcagctcttgataccgaccaggacgacctcgtcgaccgcttcctgtcgctcgtccggctcccgacggccgtcaagcccctcatcggctcacaagctcgcctctttgccgacgttgctgaacgcctggcttctgcctttgtcgccaagccctcggacgagaccctcttcgacttcctttgcctgcccaaggtcggcttggtccccggccttcgcgcagatgtcgatctcaagcagcggctcgcagccttcgcggccgtcgactggcccgagcttccatccaactcggcccggggtgtccgtccttccgtcacgattgccgaggccgtcgctcgccaggtcacgtccggccgtctgtcccgcgcggctcgcctgctatctggcgctgccaaggtcgcacccctttcgccggaggtcatcgaagagctcaaacgcaagcatcccgacggtccgatcagtccctttgccaccgccgccggccctgctccaggcatggcgcccaaagccgacatcatcgacgaggtcttccgcaagttcaagatggacacggcgcctggcgtctccggctggacacagcctctcctgtcggtcgctcttcgtcgtccagccgtcgtcacatttgtgtcggtgttggccggtctcgtcgctcaaggctcagcacccggccaccagcttctgtgcgcctctcggttgacacctctcatcaagtcggatggcggcatccggccaatcgctgtcggcgagcttctgttccgactggtggccaaggtcttgcttcgacactacttcaagcccgacatgctccttcccaaccagctcggcgtcgggtccaagggcggcgtcgagccggtggtccgagcggtccagcgtgcgctcgacgatgagctgcccaagtcatatactcacctcgtctcgcttgacttcatcaacgcctttaacaccgtcgaccgtcgcgacctcgccgcaggactccgcgactttgcccctgccttctaccgcgccggccgatggatctacggctcgtcgtccaagctcgcggtcaccggtgccgacggtgcggttgaggtgctcgagtcatcgcaaggggttcggcaaggcgacccgttcggcccgcttttcttctcggtcgccattcgtcggacgctggacgacctcgtccgccacctcggccctgaccggctactgatcggttaccttgacgacctgtacgttctctcgccggatgacggtgcctttgacgacgtccagacgttcttcgacggccgcggctcgtgcctcgagctcaacatcaccaagtccaagtcgcacgccctcgaggacatccggtcggacggtctcgacatccttggcacggcggtcggcagctcggcgtttcggtcggcgttccttcgtgacaagatcaagcaccaggtcggcctccttcaccagctcggcgacctcaaagcccagcatgccctgctcttgcttcggttctgcatccagcaggaccttcggcacctgcagcggacgctcaagacggacgaccttcctggctgctgggacgatctcgacggcgctctcctcgactcggctcttctcatccggtcttcgcctcgacgcctcgcaacggacgccgacctcgttactctgccggcccgactcggcggtcttggtgtcctctcgcacacagagtgcgcgcctctcgcgtacaaggccagctcggatgcagccgacgccgctctcgctccggtccttctgcttgatgtcgacgacgaccgacccctcgtcacccagcgcatgcgatgcgacaaggccttcaacactcggctcgaacgtgtcctccgtcggcttcccggcctcgagcgcgacaccgtcttcgagtccggcacggtcctcggtcgacgttggcttggtgtcgtccccttccggtcggtgctcgagctgtcggacgccgaggtcgcctctggtcttcacttccggacgctttgccccggctcgctcgacttctgcgccgactgtggcgacgctgctccgttcggtcacgacgaggcctgctctggtcgtgctccggtcgctctcggtcgacacgagcaggtcaagcggctcatcagcaacaccctctcctcaaacgccaagattcgtgttgttctcgagcctcttgtccccggcagccagcttcgaaccgaccttcgcatcgccggtcccgacggtgtccgggagatcgacatcaccgtcgtctcgctcgcctcgcaggacgctcggtcggcctctgcccgtgctcactcggacctctcgctctcgttcgccctccggtcccggaacgccgtcgacgacaccctcgccctggccgctcggagcaagaccctcaagtactccggccgggtcgccgttcccttccgtcccttcgtcctctcgtccggcggcgccgtcgagtccggcactctcaagctacttcacgcctggcgggatgtcctcgccccgtcgtccttctcgcacctcactcgggtcctctctctcatcctcgtccgggctcgggcccggctcggtcgactctgatcgcccggccttgacctctctctggttcaggatgtcggtcgctcggtcggcctagccttggtcgcgctcttccgccgctcgtttcatctctcttctctttcattggctcctctctcttttgctccgtcttccttcaccctccgcttccgtgcgcccgcttccctctttcgtagctagtcccttcgcctctctctttcccttctcgacgaccccccttctccgtccactctacccctaggcagccgacccgaccctaccccgttcgtctctgtccccgtcccgcctctcgttgaccctgccctacactatccgatgctgcagtaaccctaaccttaaatcaaaataaaaataaaaaaagaagccccttagccacttgaactccttctcacctccaatgtaccaccgtccatagcgcctctgaccctctgctcccatcgcatgcccctttaaactctaaccctaacccttcgtcgcccgctcggcaccatgcagaggagaagccgcatgttgatcccgcccagtcgtgcgtccctacctgcaccgcgtccggatcatgacaaggcctcgcgcggcgtgctcggcgacgaactcaatccgcttcctggtgcgcggagccttcctgatcgccgtctcacctatggccatcgtactgactttcctctcgtcctctccgccttgcagcgcaaatcgtctgtcacagcacaaggcaaaggtgaaggcggctagcttccgactcgaggaccttcgctcatctgtcacctcgcagcgtacgcctgcagcacctcgctctgtccaccgctcgcagcactctctgtgctcggtttccttcgagctcgcaacgctgcctactccattaccccctctcggacaggcaacttgccgagtcgagtctgtcgactggcttgtgggcgtcggtcagaccagacgagaccttaaaggctgatcatcgctgaccagaagcagctttaaaaggcagaacgactgccgctttacatgtatgcgatgcgctctgcggctcttctctcatgagtcaggtgcagctgtcactcgagggcgaggcgatcctgacctgtcccgagcggcccggcagaggcagactttggcgtcttgactctcgcctcctttccgcctcatttcgctgccttccacccaaggtgtcgctccgcgagtagacgaggcgccgaacggaacggcgagcttccgcgctgcctgttgtcgttcaggatgcctgaatcgcggccgacctgccgtgccgcgtcagaagagtgagagaaaaagtctagattgcatcctcagatacaaagcgcgtgaaaagaaaacgtcgtcatgggtccccccgccagctgaggccgggcgcccagcgtcccgtgcgagggatgaaagcagccatgagaggtcgtcggccggccgagacggccaggcgggcgtcctgactttagttgttgtagtactggaacagttcgcagcgggaccacagggcgtcagctagtggcgcaaggcaaggagagggcgggcgactgacgtggatgtcctccttctcgcggccgcgcataaaggggggctcagtgcccttgaagtagatgtctaaaggcgacgacggaaaaaggcaaaagtgtcagtcaagaggcgccagagagcagagaatttgatcaggacgtaccggtccagaactccacctcaatgtcaggctcctcgcactccttagcctcgacgaccgcttggtcgatctccttcttggcggcctggtcgatctgcttgagcgtggcctcgtcggcaacgccccactcgatcatcgacttcttgaggcccatgatggggtcctgcgtcgaccgcatcttctggacctcctcgcgctggcggtaggtcgttccggggtcggacatcctgcaggagggagggggggggacgccgagtgtcagctaagaggcatcgccgacagcgagcagacagagcgaggaacgcacgagtgcccaccgtaacggtaggtgacaaactcggcgaggagcgggcccttgtcgtcggccgcccactgcttggcaaacttggaggcctggtagcaggcaaggatgtccatgccgttgatctggatgccggcaatgacgtcgccccgcttgaagtactcggtgttcatcgacgaccgctcggccgaggtacccatgccgtacttgttgttctcgcacgtgaagacgaccgggagattccagagcttggcctgcgagggagagggatgcgcgcgcgcagcaaagacggaggcccggtcagatctcaacgagccgcgcgatcggcaccaacggccatcgtgagacggaccatgttgtacgactcaaagacctggccctggttcgaggcaccgtcgccgtacatggcgaacgtgacggccttcttgccgaggtacttctgggcaaaggcgatgccggcgccgacggggacctgggcgccaacgatgccgttgccgccaaaaaaggacggggtgaagatgtgcatcgagccacccttgcccttggacatgccgtccttccggcctgaatttgagagacagggaagggtggtgagcgtccggcgggctcaaaacgacgcctgtgcagcctcgacacgcagacgcaccgaggagctcggcgatgacacccttaacagttccgccacggaggacggcgaaggggtggcagcggtacgaggtaatgacgcggtcctcgccgtcgatggccgagcacatgccgaccgagacggcctcctggccgatggcaaggtggcagaagccgcggatgagcttggccttgtagagcatgtcgcaggcctgctccatcttgcgcatcgtcgtcatcttggtgtacatgtcgatcaggaggttcttggaaacctcgaccgacgtcgacggcgggtcgcatcggtacgaatggaagctggggcagaaggagggagctcagggatcagcaaccgagcgcccgggcacgcgcgtcggcctcaagcgcctccgttcagagcaggaacgtacgactcgtcatcgagcttgatcgtgaactggaaggacgaggagagtagcgtcagcacatgcgctcgcatgccaggccctcacggccgctcgagccaacgaaggtcgccagtcggcgcgaccgggacgccctccgtgcgcgcgcgagctcggcgcgatcaaaacgagaccgcgccggctccgatgtaaccaagaaagaacgcacgagctcgttggcgtcctcggggaccttggtcgccggcgtgctggcgtcggcagccgtctgcaggcatcgggcgagcgcaggctggtgttggcgaggtgggaggaaaggcccgatggtggaacagcgggggcagcggcgagcagagaggcggcgtgtcagctctaagtcgccctctatgaccccaagagcgcgcggacgaacgagacggacggccctgttgagcgaggcagggcggacgaaggcagagcgcgacagcatcgtaggtattgggtgttggtagaagggcaaggcgacggtcgagagggcgagctgccgaagcaaagcggctggggcgcccggccgagagcgctcgagcgccgacctttttctttttctttgggcgcagcggagcggacaggacccgcaccgcgtgctgcaggctcagccgacgcctgaccatctctccaaagcgttcgctcatgaacatcccatctactgtgcctcgtcacccctcgggccaaggtcgcgtcgctgccagatctgcggcggatgaagaaggcaagccgtggtcagtaactttgagtcgactgcgcgcgtgaccggcacgcacctggagaaccgtctcgccgagaaagaccatctccttctgtacctcgtcgacgcggaggtctgcatgacaggcgaagagtcagtttgcgaacagctacccgagcgaggccgacctgcgacgcaccgtggatcgcaaaccacttttcgccctcgctgccaccgccgccggcccggaggtggaccttccattttgcccggtcggcctcgtcaatcttgaccttcttctttggattggtcgccgtcgccgagccggtctgggtggtcgtcgaggccgccgacgactcgtacggcatgttggcgagcaggtcataaaccgactcaatcgggtcctgcggctttgggtcgacgtctggtcgagatgcactcgtcagcgaggcgatcaggtagcagaaagcaccgttcgagaaacccacagtcgcccatgtcaactcctcggagggggaagttgacgatcgtcgggttcttctcttcgacaaagttattcttcgtgaagcgcttcgtatgaaggatcaagtacggcggcagccgctcgagcttgtgccgcttcagcgtgtcgccaaactcgtgggtcgtctggccgtcatactttgcgaggattgtcgcgagcgagacttgcgggatgatgtttttctcgaccgagtcttggaagagcggcggcttcggcaggtcgagcgcgaggaagaggaacggcgaccgggccgtcttggtctctgcgagacgagaactttcaaatcatcagcggaatgaagaagactagatctcggaaggccgacacgcacctcggtcgacgtcaaactgcggtcgcttgttgccaccagagtcagccttgacgacgtactgctgcgtctcaatccggaggtccccctggaatgccttgtgaatgatacctgtcagtgaatttgaagcaggctgtcagcctccagggcacgagatgtaagcaggagggatggacgcactcgagccggccttcttgttgccgccgaggtcgcggtggagccggttgagcagccagcctaggaactccagcgggtctccctggcgcgtgatttgaaacttgccggcgcttgcgaccgtgacctcctgcaggaactcgtgcggcgagacctgagccttgaacaggtgggggttccagaccttctttgcgagctcggcaaagcgcttgacgagctcagtcggcttgcggtccggctggaggagcgggttgtcgggcgcgagcaagaaatcgcggatcggcgggacgtgcaagagcgagaggatgatgacgttctggtagtcggtgtacttaatgttgttcaggccgatgaagccggggacgtacggccggccgtggaggtcgtagctcggcgtcttgggcaggtacgagagcgaggcaatttgctggtgcgtgtatctcggcgctagcacgcgcacaatgtcctggagcgacggatccgacaccttgtagccgtcgggcaggatgaagaactgggcgagagcggttggggctcggtcagctgccacgaccaatggacaacctccaaccgccaacctgccttgagcaaggcaacgcacctcttctgtgtcgagcttgaggaagacgtgcttcccttcgctgacgctgtgcttgtaagcccagctgttcttgccgcggccctggaggtacttgccgtcgaccaagcagcagtagacgttgttgttgctgagcgagacggagcagactttctcaaagtcaaagtcgagcaggtcgcggttgatctgcaggcaaggataggcaccgggcccgggcgcggtcagcgattaagggcaagtagctcagggaagtgaggcgagcgtaccgtgtcgaggtacatgtcggtccgcgtagccatgtcggccgtgtcgtcatacgcctcctcctcctcctcttcttcgtcgtccgactcttcccgccgatcgacagcggatgcctgagtaccggctccattcgacccctcggggtgcgtgctcgagctcgatgtttcgaaggacgctgctgatggcggctcggctcccgggggtggaggggcatctggggtcgctgcgggcaccggtactggcggcgacgctggccgctggccattcttgagcggcgagtcgagcgatgcctcctgagaagcagcgcgagggcgtttcgagggcgtcgcagacatgtctagcggagagagtgagatgggtgcggaggggcaaggccagaatgggtgtcgggcggcaggacgagctcgccggcggtcgtcgagctcgggcacctgctcggcctccccttcctcctccgacgacgacccagccagcctccactcccagacatactgaagcaggcgacatgtggtatgtatgaggctgcctctcgcccagctcgtagagagctgaaaccggcctgccgtccttgagcggctcagcaaacacattctgaacgcccaggttgccgttcgagctccgtgctgctccaaatggttcgacgtgcgtctctccatgggtaggctctcttggctctcaaagctgagctggccggcttttttcttggtccactagtgcccagagtgccgtgcgtccggttttgcctttgctttagcgggccggtctaagcaccgacgagctcgtgcctgagctgcgaccgcgccgatgcgacgcgactgacctctgcctcactagacgccgagcggtcagatcacgagctcgcgaggacgatggagatgatcttcctctgcaagaagtgcaagaaggcgttccgcaaggtgcgttgtcaaaccgcctgggcggcgaaggctgccggaccaggaggctgacaagggacgcctgcgcgccgactgactggggcgacaacgaaaggacatgaccttgtacgaagacgccgatgagttctgcccacactgtaggttatggttgtcgctttctgcttaacgctttctagcctgaccctcctttcgttttgtcctgcctgcgtcaaggtgacaaccaatacgtgcgtcgctgcgaagggattctaattcgagcgactgcagttgacgtcttgacccaaattcaccctgtgccctgccaatctcaggtcgtcgaggcaaagatcccgcaagcagtgctcggagtcgagggcgaggatgcgcggatcaactcaaagtacgtcgtctcgcgagcgagggcggtggtgtgtgaaggctgcgtgccctgcacgttgcgacgcacctgtgcacatgccctcatcggtgtctggccagcgactgccgagctcacgctgacgccttcatcactcctcaccctgccccccttaccatcgtccccctctgcgccatcaggatgataaaggacgaccgcgttgcgcacgaggacaagcggggcgctttcgcccgcaaccaggacgtctcggacaaggttgacctgccgctcaacatcggcaagaatggccggtccttggcgctcgacgacccggacgacgactggacgatgtgaggcgccaggtcctgctgagggatatcgagaggggccagcggggtcggccttgcggagtggcgcacaggaggggcgccgtcacgatcactttaacgaccttttcccacgcccgcgatcaaagctgctgagcgcagaagagctcgtcatgcgattcggttggacgccgctggctcagtcgtagctgagctctggctcgggcacggcaaaggtcgagccagcggtgggaggagcaccggcagacacctgcgcaaagcgacgcagatggcgctcagccaccttgtccaccttcggctttagaggctcgcccggatcgcttgagcttggcacagcggcttctctagcgagcttggcagcctcaagcgcggcaacgtgctcctcgagcgggacacccagcgctgccgcctcggttgcgagcgtgagccagctcttgccggtcccgtgccgagcagcgaaggcggcctcttccgtctcccaggccgagagcagtggggcgtcgtcccactgggccggatccaattggttgttggcgacgacgaggccctcccactcgacctccttaatgaggccgccatcgtccgcgtccatgggctcgaacgtgtcgagcagcggcaggtcagggtctgctccagtcaaagagggtgagagcggcgtatgggatggcgagagcgtaggcgactggggcgtgtagccctcgggcgaagctggctccgcgccatctgcgtccagcgtcagcttgcgcttgcctgggccaacaaggggggacagagagggtcagcagatgcgcgacatcatttgtagagagggtagacgcacgagatgcattccctgccgccgctgcgctcccgtacgggtcgacctgcgcctttgcagcctgcgcagccgccttctgctcggccttccgcagcttggcggccctcgccttgcttcgcttagactctggctggggcgcctcttgcggctttggcctgccaccgacgcgagtgtaccacctgaaggggaaaatgagacgtcagtgatgcgtgggcgagaccaggtgtcgaggctacgcacaagctcgagagctcgacacagccgccaatgggaccctcgctagcctcttgctccgcccgagcttcggcctcacgcagctcgagccggaccttccagctctccttgcctttgaccttggcccgagcgcggaggtcgtccgggacttggtacggcgcgtagggctggatcgggtcgttgaacagctgcggtgggaagcgggcacggcgagatcagccggcgaggtcgaacggcccagagatagcagcgacgtacgaggtactcctccttggccgctaggaaggcaccgtagagtgcggtgtcgtcccactcctccttggcccacaccttcaagccctctgccttgcctcggcggacgtgtgcgcgcgctgagccgctcgtcgacggttcagcaacggctggattgggcccattgcagccgccacctaccccgtcgctgtatgacagccagtcgtctgccgctccgccgagattgtaggcggcttggccatcctcagcgtcggaggcgaggtcggacgagtggtccgagagggcgagctcggggacgaaggcgagcgtgctcgttgcgggcggcatgagaggatcgagcctgcaaggaagcagctgcaagcgagggcgtagactgtcggatggctgtcgcgtctgcttgtgcgagctggagatggtcggcagagagaggggaaagggaagcaggacgaggtcaatgtcggaagggtcagcgcgcagcagtcgtcaacccgacgagacgagagccgacggctgccgtcgctcgacagcgacatgcccaggacggaccagcagaccccatgcgctgcaggaagggcacgcacaagccggcaatcaagtcgtacagagaaaacgtgagctggaggcttaagtttgatcgtcgcgcctgcctgcaagttctgtcgaacgcactgacacagcacgcacgactgcttgctcaaccgatgaatgatccgcaacgtcccgtatctgcaggtgctctcactgacgagtcgtctctgaaagcaatacaactgcgactcggaaccctggtccgttcaatcgacgtcggtcgagttgttgacgctgccccaagcttacctacttcagtcgcatatagacatcacaacatcagcttggcttggacagcatgcagagatttgcttggacagcatgcagagattagcagccgcccgcggaacactttgctgatggtaagaccctcgttgatttcacgctggtcaactcgcctttctctgtcagctgagacttattaagcgctcaatgcccgttgtcttctgaagtctctgctccataatcagcaacgcgccctcaacaagtcttgacgggaagacgggctcgttcactcgtccttgtttgtcttgacctcctctcatcccttcatttggcgcaaagcgatcaattctaggctaactgctaggcttcgtatccgcgcagtcacgcacagcacaattttcgctgccctggagtctcccgcctatcgcccgacaccttgcgctgagttgcccggccactggcatagacccagtgcatccgtcagggctcttttgaggcttgaggcttgaggcttgaggatcgaggtctaacccttaacggccggttttgtggggcggatgttgcaaacccgctctacttccgtctcaaggactgcctccctgcatcctctccctgttcattagagcaacgaactgactgacgaagatcctctctcgcctgtcagccccgacggttctcaataactcataaatcagcccaagcgctcctcggcaaggaactttcgcccaaggagcctgcgaagctgtcgcggtgcgaggcgcgaggcggctgcacgtccgccaatcctgccgctccgccgatgctggaaagcactggctgccgtagaaaacttagacgtcgtatgaagaggttgaaggcaggttgagaaggaccgctggcggacggggagcagagagcgcccatttgactggtgggatgactcgtgctgcttggcgagcgaggacatcaccgacgcgagcctgtccagggcgaggagaggtacttcttgcagtggtcgtgcgttttcttctcgtctcgaggcggtcgtctgggagaagagaccttgtacggccggttgctgactggtgtccggggcgactcgatcggcctttgacggcgctcaaatcgcctcgagcggaagccgtcgaaccattctctgcacctacacgtccgaaaggcctgcatgtcgatgaagctcataacgttacaaggcgaggggtcagctgtgttcccggcgaggtcagccagagccaagagggagagcgagcgcggagaggggcgacaggcagagctcagataagcggccgtcgcgtcaaggacgcggctatgagggtcagcctattctgtagctcggagctgaggcgaggttccgcgtagcaggaaggaccgcagtcgtgcagagccttcgagcggccagtagtaccgagcgcagcatgaaggtggcttcagctctcctctagctctttcaggccgacagtcttggtcctgaagcattgcttgtgcctgtcgatttgctgccacactcagcttgccagtccgttgtagggcggtcgaggtggttgcttggacccgattgttgacaagggtcggttcggcatttattcttttactctcctccgcgggccgagtcgcggctgactctggctggcttcggccgcttcgcccgcctctcgagccccgtgtctgttgcgcctgcccctacccagcccagcatcccacctcagcaagttcaaggtacgtcaggactcgagaccgtagacccgacagccggatctaacatcttgcaccctcacttcacagatggcagtccagaagagcggaagtcggtccttcttaacctactcgcgtcgagcaggcaggcaggcagctgcgggctagaccgggtcaggtcgagctcgagcgggcaccagaagactgaccttggctgccctgccctcgctcgcagtccgttacggcctcaaccccggccgcaaccttgagcagatccccaaggttgccaagcccagccagcgcaagggccgccagtcgcagaagaacatcctcgtccggggtgtcatccgcgaggtcagtcttccctcgggcagctccagtcgcaggaggatcgaccaccggtcggaagggtctgctcaagcggcccaagggacgctttctggaccgggcgtcctactgccttgtctgggaggcttgctcgcgggaccgctgctcgtgactttgctgctgcctccgtcgggcagcgcccgtcaaacgtgctggtcaggaggccggcgggttgctgagctcgcctcctcgaccagcagagggcgtctagcggagcacgcgtgcaggcggtggacgggcgggaggagggtcgtccgcgcgggagggaagctcgtgccgaggtcgggccagtccagccgctgaccttcgacactgtcgccctcgaaacctctcgttctcacctttcaggttgccggcttctcgccctacgagaagcgcgtcatggagctcctccggaactccaaggacaagaaggcgcgcaagctcaccaagaagcgcgtgcgtacaggctgctgctgctactagctggtgtcgttgtctgcagagcgaggcagaaactgacacgcttctctcctccctgtttgctcggaacgctttcatgcccggaacactcttccccatcacccctctcggtctttcgacggcctctaccaactcggcatttttccaatccatcctcctcgacacccatcccacccaccgatatgacaaacatctttggtcgtgctctacagctcggcacgctcctgcgctcgtccgtctctcttcttctctgttttggcatttggggccttgcgcgcgtgcgccagcagggggctgacttgcgccccttacccgcgcctttacaggaagcgcaagctcgaggagctcaccaacgtcatccaggagtcgcgccgcgccggccactagagagagagcgatcctcctctctttctcttccccgcccaccgacacacccttaccccccgagactctcgatgaatcgcatgcgctgccgaaactgccggccggagccctcctgagagagggccggctgcaatggacctgctcctgcccgaaactgggcgaggtgtgattgccgggcgacagggaactggaggcagacggccgaagcgaggcgcttgggatgctgcgcccgcactgcctgaccgagagcagcagaccgtgcctcgacgagccgcctaaaggggagagattgccaggccgacagtcttggctccaaaccgatgcgctcctctcctgacaacagccatgctatgctgggagcgaggctgtggacgatgaggacactcgacccagtcggcggccgaccatgacgcgcgcgccgacctcgacgagcagccgacctcttgaccttggcccacgaccatctcctcatctcatccatcttcaggatgctgcctctcgtccgcgtcgctcgagctccggttcgccctagccgatcgacaacgacattctggcgagggccacctccgctcgccagcctgccgccggctcggcggccgttcgcgacgagcccggcctggcgcagctccgaggctgtcgagcggccacactcgtcgacgcccctacccgagcccgaggagaaggcaaccgagctcaacctaccgctcgaccagcagcaacaagcggcggaggcagacgtggcggcggtggcggcggcgagcacagggacgcctgcggcagccggagcggcggcacctaccgcagtcgaggacgaggatggtaacctcttcgtctcgcacgtcccgcctgtcgtcgcatcagcagctccgcgcgaggtcctcaagggccaggtctacgtcagcaatgtctttcctgtccagctcggcaagtttgagtgcgtccaggcgagcgctgtgctgcatgtgcaaggcaagctgatcaccggctgtacacctcttgctgcgtccctctggccagccctcggcctttactcgcttcgttcaagaaggaggacctgctcgaccagttcacgcaactgccgtcgctcttcccgcccgagctcgacttcaggctgctcgcgatcgagaagcagcccaaggccggcggagtctttctgacgtacgccttctcgccgcggccgcgattcgacctagtccctggcgggaccgtcctctcgggcgaccctgatcgcgtcgtcggccgggacgaggtcgagaagcggcttcggacggcgctcgagaagaatggcggcgtcaagacctggaactggactggcggcgcccgcgtctggcgagtgcaaggccggccgtggcacgaggtgcgacctgtggccgacttgcaggtcggctgccctgctgacgatgtctccctttccttgacccgcaggacttgaatcgctttccagcatcgcaggtcaaggtcagcttctcgggcccagatctcccgcaggaggcgctctacgacctcctccgccgctacggccacatctcgaccatgacgccgccgacgccgcagccagccggctcgcagcgctttgcgctcctctctttctcgcggctcaggagtagcgtcacggccgtcagctgcctccacggcattacggtcccgatcgaggcggcggaggacggccaggatggcggcgcaaaggacgggccaaagacgacgctccgcttcgagtatcagtcgccgatcaaggctcacgccgtccaggactggatcagttcgcatccgcggatcgccttgccggttctcgccttccttctcggcaccttctcgtgagcctcccgccatgccaagcgacgatcttaacgctgactgaccgggtccgtcccgcacgcagatacacggtcttcgacccgatccgcgagttcatggtctcgtccaagatcctcgaccgcttctccctggctgcctacccaacgctgcagcgtttgcgagagctagccgagggtatcgtgcccgccttcttactgcctccagccccaccagcggcaacccagaccaagcaggaggccggcgaaggggccgagaagggtgcaacagttgagggtgatgtggcgtgggcggagcgccgcgaggccgagaagacggccgagggctggctgcgcgagtacccttcgggtttcattgtcgttgccggcccgcacgggagcggtaagacggcgctcgtcgagaagatcattggcgaggagcagaaacgggttctcgtgatcgactgtgcggcactggccaaggccaaatcggatgcagccgtcatccagcagcttgcccggcagaccggttactggtcggtccatactgagctgcagcgtctctcaatatctcactgataagcgcctgattctctgcacccctgcccaggcccatcttcgggttcctctcttcactcaaccacctcatcgaccttggcgcaatgggcttgattggccagaagggtgagttgcgcagacacctctcacattgctaagacgcgagcactgaccccttgtacccatcgcagccggcttttcgaccgacttcccgacgcaggtcaagcaggtccttgacgtcgtcacggcttccttgaagacagtgggcgatcacgaggaggctatgcgcgcccgcaaggtcgaagagctcgacctggccaagacgcgcgaggccgccaaggaggttgacaaggagcgtctccgccgctttggctaccacgaccctcgaatcgacgctcttgccggcaacggcatcatgagcgagctgggtgcgtgtcagagagatccgagcgagtctgttgagaacgataaggctgacttagcaacctcgaccccaggttacggcgacgagccgctgctggatgccgacgtcggctcagaggaggaccgcctcttcctctctgtgcttaacgagaaggacgagcccgcagtccaagactacactgaccgcgagaaggatcacatcgcgagcctgcccgtcatcgttctcaaggagtttgccgccaaaggcagcaaaaaggacgagctgtggacggccatcgctgactgggccgcgggcttgaccgatgccggcgtagctcagtgcatcatcatcagcgagaacgccaacgcgagctccaagctcctcaacaaggcgctctcgtccaagccgatgaacaccatcacgctcgccgacgctgatccggcgacggccctctcgtttgtcgccgaacggctcggcctctcgaaggaccggatttcggccgaggagaaggctctgatcggcgcgctcggcggccggcaaaccgatctcgagggcctcgtctacaaggtccggaccgggttgaccatcgccgacgcaatggacgacatcatcagcaagagccagatggagctgcgcaaggcgctctttggcgacgacagcgaggaggtgcgtcccgctctcagatctacttaaagacacccgctgaacctctgacgctctcctccttctcaggcaaagtcgctaccgtggacgcgtgcgcaggcctgggcggtcgtctccaagctggccaagggtaagggcgaggtcgcctactcgccgctcctgctctctttcccgttcaagggtgccgaggacaagctccggaagctcgaggccgccgaggttatcagcgtaacgtcgatcaacggccgaccttcgacgatccggcctggcaagcctgtgcgtccctagtcgtagcgcccttgcgtgtccaacgctcattggactcaaccctgtctttctcatcttcaccagatgtaccacgccgtcttccgccgcctcgtcgaaggtgctctttgcacttctctctcgctgttacaggtcaagctcgagctgagccctctctgcccttctcccctcagaccccgtcttccactcgtcgcagagcatcgacttcaacaatcaggtgctggcgtcgaacgagagcgcggtcaaggcttgcgaggaagaactccttagcctgagcacgcttgacggcgtcaaggcggcctggctcaagcggctctttgcagcggacccaatcgagctccgagcgggtgcgatcctcgaccggatgaagacggcccagacggcgatcaaccatctcgaacaggagaacgccgcgatcaaggccgtgctcgcaaagcacgtctgagggccggcgtgttctccgtcctttctctctcatatctgcgtatttgacgaatctaacgacatgtcgagcactgagacgaggaagggcatgggggtttgcgagcggtacagacgagagcgagtgcaaagagaaagacctgtgcaaggaggggcgtcagagaggaaggaaggagcgttgggtgggcgagctgattaagtggagtgaggtaagctcgacgcttgaggcgcggtcagggtcctgcaaagcaaaggggcgcaaacggtagtccttgggtaaaggaggggcgagggagactgattagcgagtggaggatggaaggcgggagtgacggcatgctacagagggagggtggaaggggcagatgcgagcagacggatcgcgagactgatggtacaagaagcggcgacggagcggcctctagcgctcgcggctgaagcgacggttgacggcaggcggcggcgccgtcggctcggcccgcctgacgacgtggttcgggatgctgccggcgccgcaggccgacgcggcgggcgcgatcgtgttggccgtccaggtgtcggggtagttgcagccagcgaccttgacaaaggcccgagccgtgtcctgtgcgttagcccagccggagccggcgtcgtacgtcgccgtgccgtccgactgggtgtaggtcctgaaagaagggggtcggccaaagcaagaagtcagccaaccgtctcgagagcgagctgagtaagagggacgcacgggccggggagcgtgatgggcgtgcccgtctgcgtcagctgcgggatctgcgtcatctgcgcggcgctgacgctcgacatcgatggcggcggccaaggcgcggtcgtgacgacgccgacgccggcaccagcgccgcctgtcatccagctctcgagctggccgtcccagttctggttgcggacgccgatcgaggcacagtggccgtcggcctcgcgcgggtcgagcggcgcgtagccgtccctgaggccttgctggtagttccacatcgggttgaccgggtgcgtgaaggtcgtcgaggcgccaatcttccagctggcgtcgggcgaaagggaaggggcgtcagcggtccggccacagagatgaaacgacggagcccttgggcgacgcacgtccagaagaagtagttggtcgtcgcgtccatgccggccatgatgaagttcttgaagtcctccttgcgcgaggcgctccagttggtggcgtcggtccactcgtcgcacgagccgtagctccgggtgaagcccgggtaggtgccctcatagcgcgtgccctcgtcaacgtttgtgacccagaggccgcagtcgttgatcgcaaacgaaaattcgccgccctgggtaaggccaaactctcggaaggacgtgttgaactgactgccccatctgtcgcaggccatcgccgggaaggctgatagaggctcggtgtggggctgggggtcgaacgcaaagtaagggtggttgtcgagcgagacgcggtcgctgttttgaaggaagccgttccaggcgcccatgcccatcatggcgtcgtctggggcaagagcagaagggggcaggggtcagtcgcgaaaaggagtaagaagagggaattttaaggatgcacggaagacgatccaagggcccttgccctcgccgatgccagtgatgccgcggatcatgtcgtaaacctcggtgtagaagctgaagacgggcggccggccgaggatcggcgagaacggctcgttcaggatgccaaacatcggaatgacgtctttgtactggtcctgcatgatgaactgggtgagcgtccggatgatgttgagcgtccgctgggcgttggcgatgcccatctggccgtagaggaagctcgcgccctccatcgaaggggccgagaacagccggccagagtggttccaaccgttctgcgagcccgggacggcgtggaggtcgaggttgatgcggaggccgtacttgcgggcccactcgatcgccttgaggaagtaggtccacgagacgccttggaggtagggctctccgggctccgtctcaacggcccagaagccgatcgggatccggacaaaattgaagccggcggcggcgatctccatgctggtgagggtgcgcgcgggaaggggaggatcagcaaggggacagactaaggcccgagcgaggccggccagactcacaagtcttgctcggtgatgaaagtcttgtagtgctcctccatctcggcgtcgcggttggcgcccatcgcctggcaaagagtgtactcatcgacggctcggggcgtcgcgtcgtagtacttctcgtagaggccaggtacgataaagggctccgtgttgagccagccgccgaggttgataccccggattcggtcgacgccgtagttgaacgtctcgttgagcgcaggagaccagctgatgagacgtccaaggttgtcagcgaagaggctaaaccattaagcgagtaggaaatagcgatggcgcacctttgcgagcggccggcagagttgatgtcaaacggctggtcggcgtcccagccccaatagcctccaaagtcgttcttgtactcgaagccctcggtgccgtcagtaaggatgacattggagcccgtcaggccaaacttggcgagcaccggcttggcagggtcggaggacgaggcggagggcgaagcagaggcggacgtccgggtcgcgcgttcggacgactcggcaggggtaagcgggactgagggcgcagaggaggatgaatcgctcgaaagcctgagcgggcgggaaaggccggagagggagtcaggcccgggtttggaaatcagaagacaaggatccaggcaaggacgtacgcaacgggcacaccaacggcaacaccgacgatgacggcaagcgcgagcaaccctccgccgatgaaccaccacttccgtctcctccagaggccggccatccccgcgccacctgcaccagcaccgccccggccgcccgtcgcccgatcgcgctcgtagccagcccgcgcgccgcgctcgtacttctctgccgaggtgaggtcaaaaccctccttgttggcggccgagtcgagcgagggcgaatcgggcgcagtcagggcgtactcttcggcgctcgcgccggcgttgttgggcccgagcggggaggcggtcgaggcgcggttggcgaagggaatcggggcggcgtagagctgcaagaggcgaggtaagagaggatgtcagttggaggagggacgagggaatgaggaatgagaagcaagcaggtgatgaggggtctcgagcacgcttgcgacgcgcgcctcgaagcacgcggagatgcatccgatgccatgtcggcaagccaacgaggagggcgacaggaggcggagagtcaatagaggagagagaggtacgtacgcccgtcgcgctgtcgccgtcgtcgagcaggccgctggccgaacgcgtgctgagggccatagcggagccggaccggccgccggcggtaaagagctcgctgttgagcgaggacgcctgagagtaacgcgaggtgaggccatagccggagactggcgagagggcggaaggaggatcgggtgtcagaagggagaaaaactcaggacaggcgggacggagatgggtagcgggggttgggtcgccggccggcggtgccgagagacggctcgagccaagaactctcggacgcgagcaagagaaaggaggtgggccatcggcggcggcggtgggatcgacctcgcgtcaagccctgccctcccccttcctcgagggaccgggactgctcaggaagagagagagagggagagaagagcaggcaaagcgacgcacagtgcgaatttccgaggccagtgatgtcctcgtcggccgagccgagcgggacgagcgtcggcgagccgggcgagcggggcgacgacaggagcgtctggccctcgtgcgggccgccgtcttgggcgctgacgggcgtcgtcgtcgtcggcgggacgaacgacatggagccggacatcgaggtggcaagtgagggcggaggaagtaagggcagagggaaggagaggaggtggtcgtctggtggaagaggagaggacgaggaggccgacgggcgaaggaagagcttcggctcgccagctgtcaccgccgccgccccgcctcttggcccgggcccgtgtgtttctgtctccgaaccacttacggcctggcattcctcgacagacgctggcagaggagctccggctgggggcgcaggccaactgtaccctgccctctccacctctcctcttctctgtgtctgctgctgctgctgcactctcgccatgcctggcctggtcatctcttccgaaggggcgcgtcggcggccgtggcgctgctgcgcggcgttgattggcgcgacgactccggcccgacgctcggccgcttgacctccgacgctgacgaccagcgagcgagcgaccgaccatcctcgacagcgacccgccttcccacttgatagaggcgcctgcaactcaagagacggaagccctcgttcaccgccagctcatcctttcatagaccgccgcctccagctcggccacctctccgagactctcggctcctacaacccggcccgcctgcatcagcacgtgccagccagcccacccctcaagcctcctctcaccaagaccagccgctcgatgtccctcctcagctggccagcggcggccctcgcgcttctcccggctccatttggccgctcgcagctgaagcagaggccagatgcggacgagtcacgcagcgacgagggcgatgcgcctcccgcaagcgagctctcggcgccggcgccggcgacagcatcggtcaacgacgatggagcggtcggcgcgtccaacccgactgccacgttccatagcggatcgaccgccctgtccgagcaggaagagaaggacgcggccgagctcgccggcctcaagtcaatcttcgctgattcgagccggcgtcggcgcgggtggcacgtcgttgaggaaggcgggcaccggatctactacgtgcgtcacgttatgagatctatctcgcagtgcgggctcgctgagcaaccgtcttgcaggcggcgacgtccgcgagcaatgccctaggcggtcgcatatatgcaccctcgacgccttcggacctgctgagcccgcactgaccctcgccttgtcttcctccgcctcatcggcaggagctccatggcgacggccccaagcacgtcgtcctcctgatgggcctctccaacacatccttctcctggacgcatcaagtcgctcactttacctcgcccgcctccgcgtcgcgctattcggtccttgtgctcgacaaccgcggctcgggcttcagcggctacccaaccggccggtactcgacgagcgcgatggcggacgacgtcgcgtccgtccttgaccatctcggctggacgggcgaggccgaggtcgatctcgtaggcctctcgatgggcggaatgattgccctcgagctcgcgcggcgcgtgcccggccggatcaggagcttggtgctcgctgtgacgtcgagcggccatggcgtttggcggaacttgccgccgaggaaggggttcgaggcgatgaggcgcttgacgctgacggcggcgccgaaggaccggatgacgatcgcggtcgagtgagtacgacggcagctggcatctctggctgccttctctaagcaaggagcgtcacctggcctaactgaccacctctcaccccgacaggatgctcttcccgaccgcctggctcgatgagcaggacccggtcgacgcgcagagtcgaacgaaccgcgagacgcggctcgaagagtacgcgtaccgatactcgctcagtacgtactgccttcctttcgctgcgagggaggcaaatgtctttatccagagccgctgacgacgaacgaatgctcattcctgcgctctcctttcggtgcactccttctcttgcgccgcagcccggccgcagctcctctctggcaacatcggccagtcgctcgcctgcctgacgcaccacgtcccgcccgcgtcgctcgccgagattggtcggtcgatcgccaaggtctgcgttgtcgtcggcgacgacgatgcgatggttgacgttgccaactcggacttcttgtacgagcatctgcgccaagggggtgctgaggaagaggaggagagtgacgcaacgagtagggtcgagctcgtccgttgggagaagacgggccatgcgatccacctccaggtctggcccccttcagtcgcttggcgcccgacccatcaactgacgaccacacctctcttccctttgccgacctgtctttctctacgcaagtggccgaagcgcttcaacgccctgctcaaacgggtttgggccgaggcggacgagcgggtcgacggcgcgtgagcgggggggaagggtgccgcttgaggagtagtggggcaggggaggagggcaattcatcatgcataacactaacacccttccagcgttgcctccctccctcttgtcgtaggtaggcggtggtgcacttacgtacgcccgagcgaacggccggccgctgggttttctcgccgggttgtgctcccgtcggctccggcggcgaatcgacttgagtctcgatcgctctttcatcctcgctcgccctccaaccatgtcctttctctgagcgttgtcaactggccaagttcctgcgagctcaaccgacacgccagcagttgagattgccctcgcctctggcacaacagggtagggcagatcagggcggcctggctcggaggccgcttcccctcctgcgggccccactgaatcggctctgcgattgatgacgcccgcccgatccagcgctgccctccgagggacgacgagcgtgagcgttctcaccagccagaaccccgaggctcgctgctgccgtcggccccgccctcggtcgagccaggccggctgcacctcggccagcaatcgggcgtgctcataaggaagaggacccgtcgtctggcaaagactcccttcacgctcaagctcaccctcacacacacactctcagcagcatgtctgcccaatccggagcagcagtccacaacacgacaaaggcagggatcgagctcggccggccgctcgtctggtcgtcctcgtcgactccggccaccggccgctcgacgccttctgctgccgctcagccctcgacttcgacttcctcctcgaggagctcgtcaccaaccgatgagcgggaggcgaacgtaccctcggccgactcgacggccgcaggcaccgctgctaacgccgatgccaacgacgcggacgacaacgagcacgttcaatcgagctcgcactcgagcgcgtcttcctcttcgtcatcgtccgacagcgaggacgaggacgacagcccggcgacacctgactcgaacgacagcggcaacaccgagggcgaggacgagagcgtttcgttcctggcaactgagctcaaggtgcgcaattgtacggccttgagcgcgtcgaagctcaattgttgaccacctttctcgtctacgtccgatcggccaggctcaacaggcgctcctcaagtcgcgcggcctccctccccaccggccgccgctcgccctcgcgctcgaccacctctcggtccgcggcgagggcggctcgggcgtgtcgttcgcgccgaccgtcggctcgacctatgggggggctgtaaggcatggggaacctagggtcccctcgcccccccccccccgcccttccctcccgcgcggtcggtctcgcccgagcgggcatggttcggcggagtgtgacttagtcgagggtgagacgagcctacgggacggtagcagcgatcagcggctcgctcgctgctgcttccgctgagaaagacaggaaggccagctctctcttcggtgatggcggacgtgtctgctcggctctgccggcacagactaggcgacagaacaggcgaggcggagggcgccgatccaggcgttggacaaggcatagcgcccctgcctcgtcgctttcgctggcgggcgggtcgagccggaggaaggcgagggatctgaagagctttttcaagtcgaacagacgagctgaccgcgtgtgattgacctctcatccgacccttgcagttcggcaacacctggtacgacgttcccgtcccgatcctgatctgtttgagactgtgcctgacgacgtcctccatcgtccacccttctagctacgccaattcggtcgtccaggcgctcttcttctgcaggccgttccgcgactgcgtcaacagctacccgtccctgctcgtcccgttcgcgcccgacgagacgccacgagaaggcctctctgtccaaatcccgtcaggctcgggctcatcaggcgactcttccatggcctcgtcccctttgctcgctcccggcgctggtggagccgtcccgccgctgcaaagcccagggacgacccggacgagccgctggccgggctcgaagcgcgtgctctcgggcggggccaagagcgacgcgaccgagggcacgtcctcgctcgagccgccgacgaatagcaacaagcgcgaccggtcgcgctcgccgtcgcggacgcggacgtcgctccagcagccgtcctacccaccaccggcgacgctgtttgccgcgctccagtcgctcttccagcacatctcgtcgatcccggcgccgtcgtacgttatctcgcccaacaaggacaaggagggcaacccgcccgtcccgttgccggccgtcagcaaggtcatcgcgcctgctgctttcattgccaagctgaaggtcgaaaacgtgatgtttcaaggaacgatgcaacaggtccgttctctccgccgtctccgtcgcccttcgttgactgacgactcttgcctggtgcactcaggacgcccacgagtttcttaatttcttgctcaacaagattggcgaagacctggcggccgaggatcgcgaacggcgcgcagctgccaaggcgcggtccctcgcgacggaagacagtcagtcccgagctgccctgccactcgggcgatcccgtcgctgattctgccgagcatcttgccacagtgtcgggctcgaccggttccatctcgaccgcaggcgcagcggctactactggccggccggagccaacgttcgtgcagaagctttttgagggcacgctcgtcaacgagacgcggtgcttgacgtgtgagacggtacgtccctgccggtctggcgttgctgaagaagccggcgctgactggtgtggagcaccttcccctggcagacgtcgtcgcgcgacgagagctttctcgatctgtcaatcgacatcgagcaaaacacttcggtcacgtcctgcctccgccagttttcggcgagcgagacgctctgccagcgcaacaagttttactgtgacacctgctgcggtctccaggaggccgagaagaggtgcgccgcagccctccgtttcccggaccctcgcagcccggaccccgctgacagccttttgtcctacttcgcaggatgaagatcaagacgctgcccaacgtcctcgccctccacctcaagcgcttcaagtaccaggaggatctcggccggtacatcaagctctcgtaccgcgtcgtcttccccttccatctccgcctgcccaacacgagcgagcagaccgacaacccagaccggctctacgagctgtttgcctttgttgtccacattggcgggtgcgtgcggcctcctctcgggagcatggtctcgaagctgacctcactgccgttcacgcagcggcccgcaccacggccactacatcgccatcgtcaagacgagcgccgggtggatgatgtttgacgatgtcaacgtctcgcccgtcgacgaggccgatatccagcgctactttggcgagtcaacctccggctcgggctacgtcctcttctaccaggccgttgacctcgacccggcctcgctcggcctccgcgatcgtcacggggcaccggcctcgacgcctgcgcccgcaccgacagctccgccacgggccccttcgccagagtcggcggcgccgcgcccgattccgacgctccatctgacctcggggggcaggctagatgcgacggtcgtcgcaccccctgcaccactcggacctgtcatctcgacgccaagcccgcctgctgcgacgccgacgccgagcgaggtcgacgaggatccgtccgagcttccctctgctgtcgctgagccgacgctgcctcgcgagcggttcgcctcggcgcctgcggtcatgccgagcccggccgcccgggtcaagtccgggtacggcgagctgtcgcactctagcgacccgctggtggcgggcgagacgcggacgtcgccgccgcgccgccactcgcagatgcggcgcatgtcgtcccaagggtcagaggaccccctacaccctccccgccggccgtcgatgggcggcgcacgtacgagtggccacagccggcaggcatctgcttcgggggccgagccccaggggttcactcggcggccgtcgggcagcccggcgccctttacacaggacctgccgaacccagacccagctgctcggcgccgcttctcgtcgattgcccttcctcccgctggttcgaccggcccgccgagtcagagcaccgtctacctccagtcgctcgtcacgggcaaacccaaggtcgagaccagggaggagaagaaggcgcgcgaggcgctcgagaaggagcgggagcgcgcgcagaaggagcgcgagaagctcggccgcgagcgcgagaaggagcgcgagcgggcagagaaggagcgcgaaaagctccggcgtgaggaggagaaggcggaggccgctcgcgtcgccaagatggagaaggaggccgagcggcgcatgaagccgacgtgcaaggcgtcgctcggccggacgacgagcctcagcttcctctcctttggcaagaaaaacgacggcggctcgtgagcggctttgcttgcttgtcgtccccccttcttatgccctccagaccaatttatcgctccgtcctcttgcgacgactgcgcaccttgtacacgtcctctctctccttggacccgccctcttgtaacctctgcctaccgccccctcgcccatctcatctaatggaaggcttgttttccccttcgacgggcttgacagtgagcttgatcggacatggatctccgctagccggcgccgcgaccgccgcccgtaaggacgagcttctggcccttgcgcttcttcttgcctccaccgccggcggccgatccgacagtgccgctgccgccgccgccgctgccggtgctgctcgccccctcgacgacacgagagccaccacggccgccgccgacatcgagcagctgctgggcctcgaattgcctccagagcgccgcgacctcggcctcgtcctcggccgagcggctagtgctgccgtgggtgatcgggggcgcaaacgaccgcaacgaccagatcgacgtcgccgccgtcacctggggcggcgcggtagatggccgatatgatggccggtcgacaccatcctcgccgatgccgccgtctcgctcggcatcccaaaggctgcgagcgagcgcgtcctcaaagtcgtcaccaccgccggcgccgccgaaacttgatgcgtggccccaggtcgatggaaagttgtcggaggtgaggttctggagctggagctcctcctcctcgcgcgaccgatcctcggcccgacgtcggtcgcgctcctcgcgcttgctcttctccttacgccgctggcggcgttgacggagcggcgtctcgaacgcggcgagcgtctcgcgcgagacgtgagccgtcaagtcgacctggatgaataggatcgcgcagccggtcggcagatgggcgagatacttgcaccgtttgcgcagatcctcgttcactgtggcgagagggaaagggtgagtgggatgatgggcagcggccgctagcatcaggctcgacgagacgcactggtgccctcctcggtcccctcgacgccgacaactagcgtctcggggaacgcctgatacgtcttgaactcggcgagcaagactcgaatgtcgagcgggtgcaggtagacgtgtcgcccgtcggacgcctggtaaaagaagaaggacggctcgaccgacaggctggccagcgaggatggcgggagtcgcggcttgaccggcaggactggctttgggggtgaggtcgagaggagggagcgacccggtgaggctggtagaatgggcttggcaagcgtcgggaccgacggcgccgagagcgagtggccctgctgctcgaggaaggcgagcggctccgatggcggggcctggccgagcggaggagcgttcgggaagagcgaatctggcagagtaggacggcctccgctggggacaaagatgggcgcaagggctgctccggttggcagagtggacgacgacgcctcgctgcgggcctgactctgggccagccgctcgagccggtcttgctcccggctagccttgacggccgcccgctcctctgctttggcagcgatatccttaacgtcgagcaccttgcgtgaaacaaggccgtctggcccaccgagctcagccgcaaagcgctccttgagctcaaggatccgcgtctgggcgccctcgatgaaggcgagcccgagatcgctctcgccggcctggcgctgcatgaccttctcccgctcgaggtcggcctggtcgcggtcgagctcgccgaagatgtacgctggcgaggcgagcatgaaccgcgcaaacgcagtcacgtccggcagaaagtggaagggcgcctcgtgcggtgggatagccgctgagggccacgttgccgactgtggcagggccagcgtcgtgctgtgcggtcgctggatgagacgcagctgctgacgcggcagctgcgttgacgagccgagcatgtgtgtcgccgccgtcggcgaggtggagggcgaggcgaaggtacgactcgcgcttgatgccgagaccatcggctggagtggcgcgacagaaggaagggcacggaccgacttgaggtccttgacgtggatcgagtcattgctgggagcaacgggggcgcgacgaacccgttagtctccgagtcacccggggatgaagagggctgcgcgccagagctgactgaccagatcggacaccgggcgctcttgctctcggcgagcgcgagatactgcagtacgcaagagtagcagtagacctgagaaagtggcgtcggccggtcaacgctggacgtccggcgcagtgctagtctggaccctagcatgggacgtacgtggccgcacttggtcatccgtggcgcgaccggttcctgaaggagggcgcgacgaaacctgatcagcacaaactcacacggtggtccgctccgaacagtcactcggatctgccacaatcgggcgacgcacgctgaggcagattgggcaggacgggagtgctggcgagtggctgtcgccggcgctggccgctgccgacgggacaaggatctggaggatgtcgggccagttgaagaagatgtccgagtcgacaaagtaggccgtgtagtcgcctcgcgggttgagcacgaacgagaagctggcgttgacgaactctggccgagccgatagagatggcagaggtcagcccacacgtgccttccgagccaggaacgagctggatcgggggtgtcgagctgaggcaggcgacgcactctctttgttgtaaagcgtccatcgagcaccttcgccaccgcctgtccgtcggctcctccgaggcggcgcttgaacctcctgcctggccgggagcgagaagttgaggaggtgcgaggcgtccatcttgcgacccatcttgcgaccgccgccgccgtcggcagctcccccgccgccaatgctgccaccggacgacccaccgccgccgttccgtcccgcccggacgccgctggccgaggagctcggcgtccgacggggggcaggggcgatgggcggcatgctttcgatcgatggcttgagggtgtggcggtaagggaggctgcgtcgccgcgtcagactctcggcatgtcgcccgcgacgccgtgacctggccggccaagcgtacaactcggcatctcgctcactcatagggcgaaggcattcaaaaggggagcaagtctatggggatctagtgaccatctaagcaaagtagcgtctaaagggttctagggagggcggcaaacgagggcgacaggcagagtctgccctcgactcactcgtcgccctcgtcctcgccgacgagcgcaaaccaggtcgcgcctcccgcaaggcagccaaagaccggagcgacgatagggatccaccagtaatgtccgccagcggtgaagacggtcgggccgtagacgagcgcgctgaaggcccgcggggcgagatcacgcgcggcgttgatcgcgtagcttggaaggcagaaagagggtcagactcgtgaagggcgaagcagtcagagttgtggaactgcgacgcacccggtctgccagccatcagcggcgccaacgcagaggagcaggacaaagacggcgaacgccgcgccggcctggccaagccccgcattccgcttcgaggagatggcgtagatgcctagcatcaggatgaacgctgcgaggaactcggagaggaacgacgtcgtccagggcgaggtcgggagcgggtaggtcgcaaagatgccggcggtcggccctcggctgaggcccgtgcgaaattgggtgtgcgcgacgctggggaccgtccggagcccgccttcgtagatatcgatctggttctgcgaacagcgaggtgacgtcgtcggagtggatgtcagtcttgcgagcccttcaccttggtcagaggcagcaagaggcgacgacggacccggtactgggcgtagacgacggcggcggcgaggaagccgccaagaagctggccagcgacgtagccgagcagcttgcgcagaggaaagcgcttgccattcgacgggatcagcgtgaagcagagcgtgacctggtcgagagtgagaagggcacagagaggttagcgcaagcgcgcagcagcagcagtcgagccgacgaccgacgaaaaagaggcgacttacagcggggttaaggtgggcacccgagacagagccggcgacgagtgagcccatcatgacggcaccagccccttgaaggacatgaagacgcgggtcagcttgcaccaaggagacgcgaaagggaggcggcagacggacaggcaacgttgaccccgagccaactgccggcgtcaccgcccgagagaacatactgggcgacaaccccgctgcgagacgagaggagcagagagggcgtcagcggtggtcctggagcttgcgagacgagccggtgagacgcactctccaatcagaacaaggaggaaggtgccgcagagctcagccaggacctcgcgtgagccggccttgacgcgcttgagccgcgaggccagtcgaccgacgtgcatcgtgcgagaagggatatgaggcgagggcccgccgggcaggagcggctgacgttcggcgtcagaggacatgaggagctgaatgagtggaagggtagggtgagggtcagagacgaaggctcgagcttcagcgagcctgcacctgacgagctcgagccgtcttcgacttcgaccaggcttcgacgagacccatcgcaagtcgtgtcgggcggctgacaggctgtcagggagaaagcgactggcattccttccattcgctcaagtcatgcgagaacggattgttcggcatacaaagagggtcatcgtcatccggcggctcccctttcaggcgaggaactccccgtggtcgtgtcaaaaagtcgagtcgagtcgggatcaagacgccgctagctcaacgagaagaaggagcctactggcgcgaggactggccagcgcggtagccgtggctgcgagcaagagcaagggtccaaaggtcagctgcttggtagaggcagcaagcaggcagggagcatgacgaggggaggaaggacgtacacgaactgccactcgcgcgggtggtcgccggccgactccttgtgggcagcctcagcggcgttctcgtcgttctggccgttgcccttgtcctcccagcccttgttgaagccggcgtcgactgaaggagatgacgggggaggggtcagcttccggccgggcgacgagaagcgaagaggtacggacagcggtcctgagcactctgccactgctcgccctcgtctgagttcgacttccagtaggcgacgtgctcgcctagcgagaaggaggaagagagatgggagcaagggtcagcgactgctcgagatggaagcgatggagatggcagagcccaaagggagggacgcactgtgagcctgctcgcggagggcgttctgatcagacatgctgtttgaggttgaaagttgagattgaaagtaggttgggaaggtgagatggtagatgggagaagggaggaagggaaggcgcctcgctgctctcttttaagggccagcagcagaggtggcgcgatggggccgagaaccatctacacctgctgcggaccgcctcctcccttcgccgccgccctgccctattgaccgcgccctctccggcccatcgcccggggcgcccgcgtggtcggctcttttgcttggtcgctggtggcccaagaaagcaaagtcgtgacctgcgctcagagccctgctccgcaagactgttcgtcgtctcgcctactgcaggccggcccgctcaagcctactgacgacggtcctctcttccagcagcaggagcgacagcagcggcagcagcagcagcagcagcatggaatgcaatggctgaattccaacgcgatgatggggtcggcggccgacgtcgaccgagagcatgctgaaacgcctcctattttccaaacaacaccgcggccttgctggcgccagtcgacgagcaagtgatgagatcgcacgcagaaatgaccttgcgaccccgtcaagagcacgacttcatcgatcacgatatcccgcctcgtctcaacgcgcccttgcacacgtcggcggccctcctcctcccttcgcccgaggcccatcaatcgtcgctcgacgagtcggcatagggggagccaggcggcttggtctcgtggaaccggtcgaagctgtggtcggcattcatcgcctacacaagggcagcggtgcgaggttaggtcggtcagcgctgaaggcgccgtgtcgtctgaagaatgagggcgacgtacccattgcgcgagctgccggacgccggggatccagcggatgaagggcgtcaagtggacatagctgcgcagagacagcacgaggctcagcaatcgcactctgtggagagaagtgctcgcagacgaacctcggcagcatgatcttcctgctctcctcttcgccgagcgcgtggacgatcgcattgacgacgtcctcctgccggagtgtcggcgagagaaagtcaaagagcggcgaggcagcgagtcttgccttgctggacatcggatcctcgacagcgacggacagaggaccgaagtaaagacccgcggcgcgcggtaccttgcgatatgccggaggagggcagatcaaggcgagcgagcgttccaggggcagcagagagggtgcgcactgggagacgatctcaaattgcaaggcctcctggaaggcaagaggcaggtggcctttgtcgagcaggagtcgactggtcgagaaaaataactctagtcagtcttactattctgagccatctttgctggtcaacaacaaacgcacccatgcgagcgcagccgacgatgcccatgacggacgatacagtcggctcaagaaagacgagaggcaaccagcatctggggtcatagagagagcgtcagaacacgcacgacatgtccctggccgcgtttcagcatgtcgggtaggaaggcctttatcgtccaaaagtgagcgacatgattgacgccgaatgatctgaggagcagcaagatgagagttagaagctgagatctcggcaagagacaagaggctgcgtcgcacctctgaacgtctacctcggtcaggtcgaggagcagcttggccgcaacgacgccggcgtcgttgacgagcatcgtcggcgagccaagctggtcgtggatgagcgctgcggtaacgtcgacggccgatggcgaggagacgtcgcacccgaagtggtgaatgcgtcgttgacgagcatcgtcggcgagccaagctggtcgtggatgagcgctgcggtaacgtcgacggccgatggcgaggagacgtcgcacccgaagtggtgaatgcgggctgcccttacaaaggacgacgaagaggacagcgacagggcttgagcggggcacagccaatcggggtctgacctgacgtcgacgtgccaggccaaacatcgagcgccgcgacggttgcgccgagaccagccagacgtttggagagcaaggcacccaggccagaggcgccgcccgtcacgacgacgagctgatcggcccagacgatctttggcggccagacaagccagcgggtcggagcgacggcaacaagggggacagcgacaagcacaagcgggtctgtcgattgacggtcgtcagtctcatgcgctacaagacgtcagctagagcgtagattgactctcactcaagaccgtccagagaaggcctaatgaccggatccgggagaggagagcgggtgaccaagaggtcagcttcctggcagggctgcgcagtcggtcccgggcggacctgtgaggacgacctcagggtcgaagcgaagccctgccgggagacaggatgcaggcatagccagagctcagtaatggcggtgcaacaagtaagcttggctcttgctctgccgggtgatggccggaggagacgcttcgagcaggccggccgggcggacgcgactacgccaagaggggcgctagcaacgacgggtcctcctcctgctctcctcaaccctcgaccagctcccgccctcgcttctctatctcacaatcagctggtcagctctcgcagcctcctcgtctgtcctcctcggcgacactcgacccacgacgcgcgccgcaggccgaagagcgagctcgtcggtcgcccggcagttgatcgcaggcccgtgcgggtcagctcccgctgaactgccgacgaaggcgacgtctcacggctcctcctaagtgatcaagaaggcggtaagtcggccttgtaggcagcgagagagcgcctcctgctcctctacgcagggccgactgacttagatgctcctgtcggccagatcccggccaacagcccgacgcgtcgcaacccccctccaccgcccgcccgccatggcgacgagaccggagcaggtgccagccgacccagtggaggatgaggtccagcgctacacgttcctcgcgacctattttgcggccggcaacgcgtccttctcgcagcagctgttctacggcatctcggagcagctgagccggccagcccacaactcgagccggccgcagtcgaccgtcacgttcgacatgttcgcccgcaaggtcgtcatcgagatctactgcgaccgtggcgcgcccggccggcaagactcgtccggcgtcgactggggctacagcaagagcgcaatgtggccgttgaaggccgagattccgtgggaggacctccagacgcgcgggatgcggcttgacctctcggacggcgtcgcgggcgagtctggcaccgtcggcatcttcaacctccgcatcaacctccgccggccgccctcgctccagtacacctacccgatccagcagacccaacgctgggagaggaacggtcgggcgcaggagccgcgcgtctctgaccggcgagcgaccgaggaagactacattgtgctcgacgccgacgctcactggggccatcagcgtaacccggacggcagcgagggcgacggccgccagatgacggtcctcggtctcccgacgagtgtcgccttcttcaaggtgcgggtgggaggaggagggtggtctctagagttaatgtcttcgctgacgccaacctcttcgcccacaccctcgtgaccagcccggcaactggttgtcttaccagatttcgctccagctcgaccagcgcgacgtcgacgcgctcgagaagctcctcaacgacctccggctgacgtcgcccttcccgagctcgtacgccgactctgcgacgatcgacatccccgactcgatcccgatgccgcccaacccgcagtcgctgctgtcgtcgatcgttcgcttcccgtttccgacgcgctacttgctcgagggcctcctcagccagggcgttgtcgcgcccgaggacctgacggtcctgatcggccagctccgactcgctacggacgagagccccgccaagcgcgagaagcttctcgccagcctcttttcgatgggcccgatctctggccggatccagatggtcgtcgaaggtgcgtccgaggcgtgctcctcccctttgaagagcagaccgcgatgggtctatgacctgcctgcctgcccgtgcccttcaaagacgtgcgcaagaagctcgccgcctctggcccggccaagtcactacggcagcacgtcgtcctggtccgccgcgctattgtcacgccgacccggctcctgctccgtccgccggccgaagaggtccgcttgcgcgccgtctggccttagcgctggggcaatatctgaagctgatcgcctcccctctgcgctcgtgctctgccagacctccaaccacgtcctccgcgagtttagcgaccggatcgaccgcttcctgcgcgtccaaatcaccgacgaaaacgattcgctccactactcgccgaagtgggacgacgtcggccaaggccgctacgccaaccggaacgaccggggcaagaagtggtgcccgggctacggcatgatcggccgcatgcgccgcgttatggacgaagggctcaagtttgctggtcggagctgggtgcgtcgagcggccgctgtcgcaacagctgccgactgacggcttcgggcctcccctcttgcagacctacctcgcatccggcggaagccagctcaagtgcgttgcgccgtccgtcacctcgactgcgtcttgcgctcaactgacgcccgcttccttcttcttctctcagagaccgccaggcctggttcatctgcgaagatgcgtcgaccggcttcacggcgcagaaagtccgtgactggatgggcgacttcacgaaggaacggagtatcgccaagcactgcggtctgtccctcttgctgtctaaagggtgacgctacctgaaagccagctgctgacaactgctcaacctctcgccctctgcagcgcgcatcagccaggtgcgttcgagtccgccctcgcctgttgctattcccgcctgaccgttttcttcctttgcctcggccagtcgttttcgacgacgcgcgaggtcaaggtcaagctcgcgatcaagcacgaacccgacatccgcgtcggcccctagtgcgtcctctttctgagcgagctgtgaccggagcgccactgaccctagggctggccctggcgtagcatcttcaccgacggcgtcggccggacgtcgcaggcgctcgtcaccaaggccgcgcagacgctgatcggcgacgcatcgcttctgaccaagtactcggccgtccagatccggatcggcggcgccaagggcatgctcgcggcctggccgtcaatgtcgcgtaacgaggtcgtccttcgtgagagcatgctcaagtacacgagcaagcacgagaagtttggcgccgtcatggtgcgtgtcttcagctggcgcagctctcgatctgagcgcatggcgctgacattgccagatccggcccgcaggtctcaaactactcgccggcctttctcaatcggcaggcgatcctgctgatggacgcgctgggcaccaaggaggtccgtctacacacccttccgcatcttgcgcctcactcgccgactcagcctacttcgatcaggatgccctgctcgccgtcttcgagaagcagctggcccagatcgagggcctcaacaaacgcgcacagaatgcccacccgtcgctcgacttcgaagccacgcacgtgagttgggtcacgcagcctcgacggagatcgctcgctgagcgcagtcgcccttgcagttcccgatccagaagctctttgccgccggcctcggcacggacgcctttgtgcgcgactcgctcgagctcctgcggacgactctgctctgggagctcaagtggaaggcccggatcaaggtcgaaaagggcgtctacctctttggcatcgccgacgagctcggcgttctcggcaaggacgaaatcttctgcgcctacaacgacccgaacgaccccaaaaaccacggcgtcgtcgagggcgactgcatcatcactcgcgcgcccgccctccacccgggcgacatccgccgcgttaaggcggtcgcccacccgaccctgatcgcggcaggcctcgtcaacgtgatcatctttccgatcaagggccagcgcgacctcgccaacatgtgcgcggccccgctaaattgccttgagactcgatccggcgatgctgacaccggtgctcctatcttctcggccttcaggctctccggaggcgaccgtgcgcgccgtcttgtctgcttgcagccctttgaggcgacgctgacagctcgcgttcgttcccctgcagtcgacggcgacacgttcacgctcgtctgggacccggacctgctgatcgccaagaacgagccgccgagcgactacacgacgccgacccagccacgtctcgtcccgcaggttaagctcgagcacatcaaggaggcgagtcaaatctctcggcatccgtcttgaccgagagttgaccctcctcttgcccttttgcgtagtggttcatcgactacttcaaggtgcgcatggacgctgtggcccttgctcagagctagcgctgaccgcacttcccctcttccccagtctgacgttctcggccgcatctcgacggcgcatatggtgatcgccgaccagaagggccctctctgcgaggagtgcatcgagctgttagtccatgttgcgagagcttttcgctgcaaaatggtcgtctgacatactctcacgtcgcagcgcgcaccttgcctcggacgcagtcgacttccagaagacgggcgtcgcagtcaagttgccgtccaagcaccgcgagctggcccgtcggcggccagacttcatgggcggcagctggcagcccgggatggtgggtcgacgcgagccctgtgagccattccgcctgatcgctgacgcccacccgttctttgcctctggcctcctctactagacgtacgagtcgcctggcatcctcggcaagatgttccgcacgatcgagaaggagccaagctttgagcgccgcaccgacatccgcctgcacccggtcctcggcgctctcaaggtgcgtgtcgtgctgcgtcctgaggcctcgtccgggctgacacttgcttgctcgatgccccaggtcccgagcaagttcctcgtcgccgtttggcagatgaagatcgagtacgagctcgacgtcgtcggctgtgagtcgcgcttgcccggtcagttcgagctcgcccgctgaactccaatcccgctcgcagtcatgcgccagtacatgctctccgagatcgaggtcgtcaccggccttgtcgccggcgctgccgtcgcgcccgagcgccgcaggaacatgatgaaggtgcgacatggccgttggccgcagccaccgagccgtcggctgaccgacctcttcctcccacttgcttctgcaaatgcaggacgacgctctcaaggttcgcctaccgtctcttcagcaatgcgcggggtccagcctgctgaccttccgtcctctcgcagatgtcgatccgcgacgccttccaggtcaagctgctcgaggtctaccagcacgaggctgccgactgggcagagaatcaggcggttccgccgacgtttcactcggccaccgagtgctttgctgtcgccgcttaccagctcggccacgacccaaaggcgcgcgagcgcgtcgagtttgagcaggacgaggtgacggtcgtcggcgacgagatcggccagtcgatgcggctcaacgccgacggctcggtggccgacgacctcttttccttctgctggctctgggccgacgagcttgccaacgcactcttccgccgcgcctcgtcgtcggacggaacgagcaagaagcggaagcacgacggctcctcgcccgagcccgaggtacgtccgacgttacgcgagcagccttgtcctgtcgctgacccgtcgatctctgcaggctggcgctgcgacctctgccgccagctccaatggcttcgccgccgttccagagcgctggctcgaaaagcacaagctgaccaagaagcgcgaaggcggttgggtcaatgtcgacgaggagagcgaggacaaggcgaccagttgcggattcgcgtccgcgccgaacggcgccctcgagcacggcgacgacgacgactcggtcatggccgaggaccggcacagcgtcatcgaactcgacctgagcgacgacgaggacgacgccgagtggccggagccgagcgatgaaccccacgccctctgggctaacgacgaagacactgacgaggatgacgacgaggctgggccgtcaaacggccgctcgcccaagcagcctgccgtaatcagcatcgacaactctaatgacgacgacgacgacgacgtgccggccggcacggaccagctcaattcggcttgcttttcgctgctcgagacacgcgctgccttggcccccgactcggacgacgaggagatctactgccagtcggactggcagtcgccagtcccgcggcggcgttcggttgacctcgagcacgtgtcggccgtactcgacgaaggcgagccgctcgagacggcagcctcgccggacgtctccgatgtcgagccggcgctccccgcctcgctagtgctgccgcctagtccgcgggccgacagccccgatgccgagcctagcctgtcggcgaagggtcggccgtctttcgagcggacagtcgagatcctcgacagtgacgagttctacggcgagggggcgacgacgaacgacgacgacggactttgagcgaacgacgagatgacggacgaacactgaggccccccggtgggcgagacgagtgacgacccttcttcctgatgatcatgtgacgaccacttccaagctcgaacgacgcagcagatgggccaccatcgcactcagctagagcctctcatcgggcgagcgtgtgacagtcatgaaatgcctcgactggaccgcccatcagcggccctcgccgtctctgaggacgtctccgaggccgcgtccaacgcgacggttgaggacgagctcgccgagctggcggttgacctcgccgtaacggtgcctcgtcgcgctgctttcgagggcgagcgaagactcgagtctgcccgggccgtgctcaagcggcgtctggggtgaaggatgcgcgtgctggtaggcctgccgggcgtgctggagcggcgagcggacaaagtgcgggaagggcgaggaggcgacgtctggccgaggctgccggggtcggtgctagaaagcgcgaggaggagaggattagctcagacgattcagcggcagagggcggaggctgggagacgtacgagcgagtgcagcagctggttcatgccggcgtagggcgagtcggcgagcgagtcgacattgccctggaccgtcccggcggtcgtctcccaggtgtcggcatcgtcgtcgtcatcgtcgtcttcgtcttcgtcgtccatcggcccggcgcgtatcggccagccgaacgacgccctgcgcgagtcgtttcggccgtcgagcgggacaggcaccgtcggcgggcccatcaagggcgtgatggcctcccgttgcgagtgaaggctgccgccgacaggtcccatgccgtctggcggccggccgtgagcgccaccgccgacggcagagctgctcgccgcgctcgaactgctcgaccaaggcgggtgctggtcgacaaaggccggatggaagaggggtgcgttgcgatggtgggcgtgcgagtcgtgctgcgcgccagtcgtcgcccgcggggtgtggatgctcgggccaccaccgctgccgtttgtcgcctgctggagcaaggcggccgatgctggcgggaagggtgggaaataggacggcgactggccggccgggccgagtggcgagggcgccgttgcctgctggctcgagcgatgcgggtggaagtaggccgacggcgctggcgggcggccggtcggcgagtagaaggtcgagtcggcgccgacaaggtcccacgacgatgatccgccgaccggcctcgaggagtgagcgggcgggacgtcgcctcgccagccagagggcccggcagcgacccactgagtttgctgccagccgctctcgccgtcaagctcgtcgtcctcgtgaagcgcggccgggccctgctgagaggacgagccctgctgcgaggacgtgtaccgccggcgcttggtcacctggtcgagcggcgacgacggcggcgacgacgaccggaggcgtttggaagtcgcgagcatccactgggggcgcgggagatggtctgctgggctgatgagaggcagagggcggcgagaggtgtcgggtcgagagaggaggcccaagaggaaggacaaggccgcgtgttggaagccgacgtgccgacgatggcggtctggctgctgggcgtcgagtgcgatgcgtagacggcgatggggggcccagagacagagtgagggtctggcgaggttgagagagactggtgggaaagaggagagtcgacgttggtaggggagacggagggaggtccgggctgacggggcaacaacgcgtctccgaccgcagcctgcgttgcctcaaccctccagtcgtcggctggccgctctttcgctcaaagtacggaagaaaggaccgaaaggctttgtcataaatgtccccacctcactgatcattcagcgacatctcgaggacgagccgaagttcttcgtcctcgcgctcctcgcgcgtcatcggtcgcgcgccgccgacggcccgcagtagcggcgacgtctgggcgacgagtgcgggcgacatgcacgcgctgtttgcagaaggcggcgagcgggcgacgctgctccacgacggctgctgaccgggcagtctccgcgcgaaggggaccgggctggacgccgcctgttgctgttgctgctgctgctgcttgcctttgccgacattgggcgggggcgatgccgagagcatctccggccactcggtccggtcgtcgaagctgccaaagacgggcgtcgggacggccgaagaccggcgggaggtcggacgctcctcttgcgtgccccgggccggtcggccggcagcggcggtcgacgatgacgagcctccccggtcggcgtcgtcaaacagcatctcaaactgttcgtcgtcgtcgtcgttgtcttgttcggccgactggtcgagcaaactacgttcgagcgcctcacgaagcgattcgtccctctcgtcgtggccgttgtccgccggccggctcggactcgaagcgggcggcgcagcatcgacttcggccgcagcctttgtcgaccgccggcgggcctcctcctcctcctggctaagaagcagggcgtacgccatctgctcttcgaccgtcaggtcgagcccgccaaagatcttgtcgcgcatcgcctgctcgctggcgacggccgtctgcagcaagtcttgggcctcgcgatgggcctggcgggcggacaagatttcggactggagctcatgctgggctacagagagcgcaaaaagatcattgtggtcagccgccgctcttgttaggctcgggcaagtagagtgacgcacagtgcccgctcttgccgttgggcgtccgcatgccggcccatcccgacgtgcccgccttcttgttgacgaccttgcccttccactcgcttctcccctcgcgctcgcgcccgcccgagcccattcgccagctgaggatcttgccgccgacgcaggcgacgagcatgtcgcgctcgagcacgatttgcgcgacgcgccagagggccgggtcgagcgcgcccgcggtgaggtggggtcggagctggcgcgtcaccgagcggtcgttgaacgtccggaggagcgtcggcgggctgaccagagggtcgtacaccttgaggacgccctcgagactgcggagcgtgtgcaatgagtcatagggtcagttcgggcgcggccagagacggcgagatgcaggtcagacgatgacgacgcacctgccaacgaggacgagccccatcgtgacctcaagtgccgtcaccttcccttcgatcgcccgccactggcggacgagcgcgccgtcgtcccagttccagagccggacgacgccctcgccgtcgccggtgacaacaaacttgccctggccgaccgagccgagcgcgcgacgttcgatcgaggtcgacatcggcagatgaaggacctggagccgctcgtcgctgttggcaggggcggcggcgggcgccgtcggagacgcggccgtcggtggcggtgcattggccagcgcgttcgaggacgggatgcggctgatggccggggtcggcgcgagcgaggctgcgtgcttgaacggcagaccaggcgggagcgggacgttgaactccgagtagaaactggtgagctcggctgcggcggccgagggcggggcgaaggcggtcggcaagacttgcggcgcctcagaaaggtcgtccggaaaagtgatggcgagctgctggaaggcattcgacggcgtcgtgtgcaggaggacccggaccgtcaccgcagctgcgaccttctcggcggcgggagcggcagaggctggcgagaggtcgtcgacatcgagcgcgagggtgacggtccggtcccggtcgccgacgactgacgcccggagctcgtcatcgatccatgcggcccgtcggacgcggctctctgctggctcctcgccagcgacgtctccgacgacgcccgtccagacgacgacggtgccgctgtcggtgatgccagcgaccgtcccgcccgcgcgctcgtcccaacagacacggcgaaccgtctcgcgcgctgcgcgctcgtctcgcgtcgcgcggccgacccacaaccgctggagcgtgctttgaccccggccggccgacgggggtgggacggcccagagaatgacgcggccgtcgatgccgccgctgacgacgaccgagccgtccttcgcgccgctgatggcaacgacgggcccctcgtgcccctcgccagcgacggcatggaacgtctttgccgacgtttttccgttgccggtcgcatagcccgcgacgagcgtgcatccgacgccgccctcggcaaagccccagacgacggtgggcgactcgcgcttgctcgcgagcgcgagcaccgtcgggggcgaggcgtgcgcgggcggctgccagagcgacgtgtggtcggtcgtcccccacgggtcgaggtagccctttgagaccttgccgttcgtgacgtcggaccgggctgcgaggccgtgggcgagcgaggcgctcaggagcgacggcggccggagctggtgagggagcgtgttgggcggcgggagcgggtggaagagcgacatggtcgtcaggttcgacagccgcgggtcgtacgtgatgactggcgtcttagagcggctcatccggctgcaagaagagcatccagtcagggttagcgacgggcctctcggcgagctcggctgcggccatgggagagcactgtgacgcactcgaggagccgttcccgaccgagcgcctccttcttccagctcttgccgcccgctccaggcaggcagctcctcgagacggccccgacgccgggcccaccgcgaacatagttccgaagatagcacgcccgccagacggcctcgtcgtcgacggcggcgagaaggtgatgagctacctggcggaggacgaggagcgccgacggcggcaggtacgagaggatctcgtggagcgtctcgatcgggaggaagaggagtggcctgtcgcaagcgtctcgttagttctgatccagaccagtcaggaaggtcaaagcagcgggatgtacgactcgaccccaccacgtgcgagctgcccggcgccggtcgagccaacctcattgtcgtcgtcgctctcgccgccagcgtcattgccgactgagctgccgagatcccagtgcttcctcggcgttgcgagctctagtcgattcggccggcgtttgctcgccttgcggccatccgaggcgggcggcaggtgcggctcgtcgttgtcgtcgtcggcggcggcatgctgggcggttagctgagggttgctggtcggtgtcgttggttgctggctgtgttctggagatgctagaggagggctggggtgcataaaagagtcgtgtcgggagggcgtcgagggtggcgagggcgaaggagtgttggtgatggtcggccgggaaggagcaccgtcgtcgctcgacgaccaccagcatcttcacaacagcatggccgacgacaacgcaccactcctgcctaggcatgcagccgacacggcgtcgcactcgacgacgccgctctcagccttcccctttgtcgacccttccgcttgggtgcgtcctactggcggcggcagcggcggcggcgggaggcgtcatcgcgaccgaccgacccgagctgacccttgcctctgaatccgctcgcgggtcgggcccctttcggacagtcgacggtcgacgaccgtgtgcgcggaggcagctcccagtcgtacctcgagccgctgactggtggcaaggctgagcacagcggcgttgcgctgggcaacctgactcacaaaggcggcggcgtccgcttctacggcacgctcggtgcgtcgactcgctcgtcccccccccccccttgcccggctatctcctttgactgacccaagatcgggagaggacagacatcaagacgcttggcggcgccggctttgcctcgcagtcgtacaccttcccatcggacgcgccgcttgccatctcgccgacgtcgtacgccggcgtccggcttcgattcctcccgtcgacctcctcgtcgtccgcctcgtccgagaagccccaaccccacaagcccgacacgctcacctttatcctcaagacggtcccgccacccgcccagcggcccgacggccggctcgaagcgactctctcatacgaggcgcacgtcgccgctcctcttgtctctggcggatccgtcgacctccgctggtcggcgttcgagccaacgtaccgcggcaagcgccagaaagacgcgcccccgctcgatccgagtgacgtcaaggcagtcggtctcatgtgccggagcgactttggcgcgcaggaggggccgtttgagttttgcctcgcaaaggttgagcctctccgtcgcaggcagagctggctcgaccggtttcgggccgcgcttgtagccttctttgcgcgctgcaggtcttggatccgagccgttcccaggcaaggggtacatgcgatttgagcgaaatttatcggatcaacacgggagtttgcctggccggtccgctaggaccaagcgagatgcaggaaactagtctgccggcgatctggtcacggaaccggccggaaaaggacggggggggtccggggatcccgcccctgcgcgggccgaaaactttttgtcgagatcttatgggatcgctacgagaccggtaccgcttggttcctacaattcaggagaggttgcccaaactagtctggtggcgattcaatcagatggtggccggctagccaagggggggggggggcgcgcgcccaggtcccgaggcgcaggtcgctgggctgctgcgcccgccgcccgtcgccgcctcgctcctcctccttctcctcctccccggcctcctgtcagcagcaacgccatcaatgaacctggtcctgactcgctccctggtccctgctagtctcctcccatatcgtgctggcgcgggctgttgagcttctcggtggccagccgcctccttcctgtcgcccaacacatcaccacccgctcaccttcctcaatcgtctactcagaaatgcccatcacctgtaagtcggcttgagcttgactctgttcttccaagtgcctatccagagccatctcaatcccagaagtagtcggaataacagagtcaagcgcccgcgcccgactgccgccggccactcgcgccgtcgctccacgtctgccgctccgtgtggacccaaacggccagcttcctcgccttgccgcccccgccgctggctttaccagcgctgcctcgttcgtaccgcaagacgtcgacgctctctccttcgttaccagaggaggggtgagggaagatgtggtccgtgctcttgttgtcctccatctcgccgagcccgagcgatatcgccatcggcccttccacgtcgtcaaacgtggagtcgtcggacgcccgcccgcgcgggtgatgtcggccggccgagggccctgcgggtcgagcggaggaggtcggcccgttgttggtgccagaggcggaatgcgagccgaagccggtcgagtaggcccggcggggcttgaggtgccaggctgcaaggacgtcgtctgcgagcagggtggggcttcagtcactgagcgacgagaggaagggggggaggggggcgcaccctgcgaggcaaagaggataaacacggcgggcgggatcgaagcgacggcgaggtcgcctgccgggctcgtaaagtcgtcgacctgcgtccatcaaacgggcgtcagaagagcgagtgaggacgtcgaggggagcaggacgacgaacgacaaggagcgcaacaatgagcgccatcaagaccagcaggccaaagaacccgacgcgaaacaccaggccgaggttgacgccctcaaagcgatcggcaaagcgcgccggcctcgacgtcgtcttgctccggccgccgttcgggccggtcgtcgtcgtctttgacgtcggaacagccgctgcggatgaggaagggggagcggggtagggagcgaggtcgtcaagccgcgttgcagtgtttgacaaggctcggaattggcgccagtggcgaacgaggatcgtcgctgcgacgactgccaggccgacgagagaatcggtcgtcagatctcagagaggagggtgaaggtggaaggctgagcgcaccctccagcgcgaggagaatgacctcgaagatggcgcaaaggattgacgaccacagattcagcgcgtcgtgttcgatctttgtcgaccgaccgaaggccgcggagaaaaggggaagacgtcagcttgaggggtcgggtgggcaggacaaaaaggagggggacagaccgtcgtgtagaagatggccttgtggacgattgagcggtctcggaggccgagctggggaggccgacgttgcgagaagataggcgtcagaagtgaggggaggaggggagcaggatgaggaggacagacgacgatgccggcgatgatgaacgcaagcctgcgcgatccgagccgtcagcgtgtgctgagcacttgacgaacggctacccgaggacaatctggcatccgactaagccgtcgaaaggagggctggaaacgcaccagacgagccaaggccccgcaatcaagccaaccgtgagcacgcgcgagtctgcgaacgcccgccagcggccttggcttgcgaggatgcgcgagaggatctgggagcgggagacaaggaggcgggtcggtcactcggtcaatcggctggtctgaggtagaagaggaggaggaagagaggaccagagggagggagcgaatggaacgagagaaggggggaaggaagggaaaaggacggacgcgaatgaccatcgcaagcgcagctccggccgcagcgggcgtactacccggtacgaaggcgcctacgaaggtggccacacaaaagggtcagcctcatcggtcagatgacggagtgtcctgaaggcgcaaaaggaacaggggatggaacggaccgttgaagagggcgagcgagaaggacggctctttgccgggcatgagggtcccggagaggaaactgcccgcgtgcgtccggtcaggcgtcgtcgtcgtcgtcgtcgtcgggtcgtcggggaggaaaggtgagttcaagagaggtcggaccttatcgttagcttcccgagtaagcagccatgagcgcagtcgcacgaggaaggcaagacgggataggggacggacacaaggctcgctgaccactcgtagacgacgaggacgagcaggagcgagtaaagcgtcgggtcgcgccggacgttgggggcgaggaggaaggtgaggaggagaaggctggcgggcggcgggagaggaaggtcgggcaagccggggcggatcgggaggtttgggcgggtcggggaaggccgggtcggttgagtcggaggaggtgagcgaaaggaagggtggcagacaaagggcgagagggttagtcgacggtctgagtggtgcttggtcggaggaggcgagaggtcgtctgaagccaaagcaaggcagcgaccccccggcgcagagcgagacagagacatctcgccttgccagcccgtcatcgagccaatcgaacgagccagagacagacgtacgacaacgaggcgatgccgagaaagtggagcgtaaagtaagggactatccagcggaggggctgggcgtagtcggaggcgacgtggggcatgctgactgcggctgacagtagctgctgattgctgctggctgctggccaccggtggtgctgatgctgactactggtggaggtagtgcggctggcggcggtggtgggcgaggaggaagcagggcgttggacgctagacgctgcgaagtctgagggccggtcggctgctggatcgagcaggaaaggctgtgtgctgaggacgggcaagctgaggagcaaagaaggagggagagaaggagagaaaggaagcaaggaagcaaagaagagacggaaggaagacagccgtcagtggtcgtgaaaggtcgagagggaagacgagaccgtcccctcgcccttccctcctcttaaacctcctccttttccccttggccggacgaaagacgccctgtctctgccgatgccgagagagccgacccgggccggccggccattccgcccaattagaagatgaagcagcacgcgagccgagagggagcgagcgaagggcggtgggatcgacgtgcgagcgagcgagcgacagggtgaagggcgacggtcgggagggtgaagcggtccagaggccgacctttcgccatgctgtttcgagctagcgagctagagcatgcgttgcggaggccgctgtggccgtatgtggaagaggcgagtgagacgtactcgacagaagagagggagttgataaccgatcaaggggaaaggaggtcgaggatcagcgatcgtcggaggctgatcgtgcgaacgagagccaccgagagggaccgtcagccccttgcttgcttgcttatgcagaaagtcattagcgagcagcttttccgacgacgacgacgaggacgacgaggacgtttccgagtcggcgtcgagagcgagcagccgcatctgccgtcgcctgtcgctcgtcggctcggctggcggttgtctgcttgctgcgcggcgctaccgactcgaagcgccagcagagagccatgcgcttcgcttcgagcatgtcgacgctgactcttccctgtcgtgctcgcctcaggaggtgaagcgagtggcacgcgctcgaaaagagcgctccagaaaggcttcgagccgaacaggttaaccttgcggagggagcagaagggcgaccgcgggtcgggtgccgttgtcgcctcaaggacgcgaggagaggaccttgctcgctcgatgcactcttggatggcatataagcgtctgctatcgttgctcttctcggtgctggtctggcctggcttcgaagagggtcgaggtcgagccaagacgaggagcaagctctgccgggcagactgagccggtgcgggcttttcggtttcgggccgcatcgaccgtctcccttcctcgccctggaccgccagcatctaatcagcatccatcgatggactcctacgacgacccctcgcccgccggctcatcctccaccaaccaggggccaccgccttccaagaagcgcaagaaggcaacggcagtttatcagccgagcgcgccagcgagcgtcggcggcgggcgggatgaggacgacggcaagaagggcaccaagggctactcgtgtagcgagtgccatcggcgcaaggtccggtgcgtctcgggtctggctcgcccactgccatgcttacttgtgggccgtctcgagggagagagtagggaccgaggctgacccttctgctgttgtctgccatctgctctcgccgctgctgctgttccttcgtccgcagttcacctgcccttctcgcccttcctccctccttcgccctcgtcgtccctcgccggcaacgcatccacccgaccagccatccgacgcagcacgctgattcatttctcctttctccgcctcccaacagcaaaagtgcaatcgcgagttcccctgccaggtgcgccgccccatccttgtgcctgcagctcggctcggccaccgcctgtcgccagccgcccctcagccgcagctaaaggagacagcgtcctgacaaccctccgtcctgcctgcccgcccatccttcgtccgctcggttcagcactgcgtcgcgcgcaaggttccggacaagtgtctgccgttcagtctgtcccttcccttgctcgcgctcgcgctttgagctcctccaacttcgtctcttcgctgaccttggccccgcccaccctgttcctctccgcttccctcccctccgcttcctcctcgcccacctcacttcgctcgctcctctcgccactcgcttcgcacgctctgcagcgcccggcaaagccgaagacgacgtcctcccccgtctggcccggctcgagaacgctcgctcgccctgccccacccccacctcgctccctcttcccgctccgcttgcagaggttatccggattgacgccgacaaggcgacgatccaagtctacgaagagacatcgggcgtgacggtcggcgacccggtcctgcggacgggcaagcccctctcggtcgagctcgggccgggtgcgtcccgcctttctctaatcgtctgagggcctctgaggtggtgggctgctgtgctgatcttgcgctcgacgctctctcttgctgcttggcaggcctgatggagaatatctacgagtgcgtaccttccccttggcgagctagctggccttgagcgtcgctgatcatcccccctcactcccgcctctcgcagcggcatccagcggccgctcaaggcgatccaggagaagtcgcagtcgatttacatccctcgtgcgcgctcctgccccgtctcgcccctccccagcggcaggctgacccgcctcgttctccaatcgccctttaggcggcatctacaccgaggccctctcgcggacgatcaagtgggactttacgccgtcgtttgccgtcggcgaccacatcaccggcggtgacatctttggcaaagtctacgaaaactcgctgctcgacgaccacaagattatgctcaacccgcgggcgatggggaccgtcacccggatcgctgacaagggcgcttacacggtcgacgtgcggccacttgcagcatgtcttgcggcaaccgacagaagctaacgcttttcctcccccctttctcgcgcgcgctcaggacgtcgtcctcgagaccgagttccagggcaagacaacgcagcacacgctcgcccagatctggccggtccgcgcgccccgtccgacggccgagaagaagacggccgactacccgctcctgacgggccagcgcgtgctcgacgccctctttccttgcgtccagggcgggacgacggcaatcccgggcgcgttcggctgtggaaagagtgcgtcgtcgctcgtcctccttgcacgccgagctgggtcggctgacacggccctctctcccctcagccgtcatctcgcaggcgctctccaagttttcgaactcggacatcatcatctatgtcggctgcggcgagcgcggcaacgaaatggccgaggtcctgatggaggtgtgtgcccagtgtcgttataaggggtcgctgcgcgtgcgtcgctgacccgttggcgtccgcgacagttccccgagctcacgatggagacccccgatgggcgcgaggagcccattatgaagcggacggcgctcgtcgccaacacgtccaacatgccggtcgccgcacgcgaggcctcgatctacacgggcatcaccctctctgagtacttccgcgaccagggcaagaatgtcgccatgatggccgactcaacctcgcgctgggccgaggcgctccgcgagatctcgggccggctcgcagagatgccggccgactcgggctacccggcctaccttggcgcgaaactcgcgagcttctacgagcgcgccggcaaagtcgcgtgcctcggctcgccgacgcgcgacggctccgtctcgatcgtcggcgccgtctcgccccctggcggcgacttttcagacccagtcacgacggcgacgctcggcatcgtccaggtcttctggggtcttgacaagtgcgtgcctccctcgctcgaacgtgtcgtgccgaccccgccgctgacccccttgcgcatcttgcaggaagctcgcccaacgcaagcactttccctcggtcaactggtcgatgtcgtactccaagtactcgaatgtcctccagccgtactacgaggccaacgagccgggcttcgtcgaccaccgcgacaaggtcaaggagatcctccagaagcaggacgacctggccgacatcgtccagctcgtcggaaagtctgcgctcggcgaggccgacaagctgacgctcgaggtcgcgcggatgctcgtcgaagactaccttcagcagaacggcatcagcgagtacgaccgcttctgcccgttcttcaagacgtcgggcatgctccgcaactttgtcgcctactatgagctcgcgctcaaggcggtcgagggcggcgagatgacgtacgctcgcgtccgggacgagacggccgagctcacgtacggcctctcgcagatgaagtttatggtgcgcctactcgctcgttgcacctgcatctgattcgattgcacgctgacaaccagctctacctcccgcgccagtcgccgtccgagggcaaggaggcgatcgtcagccagctcgacaagctgcacaccgagatcatcgagaagttccgacagctccaggagtagagggccgccctccgtccgtttcgctcgttcatgctcgcccctgctttcttgtagacccccttcttgccgctcttccgtcttccgttactgcctcagcctggcccgagggcccctattttctctcatgagatttctcgctcactttctgttccgctctctgctggcctctgttgatcggcatccagagccagacggccgccatcggccatgctggatccgcttccgtggaggctagctccggcgttgcagaggacacgtcggcggcggcggcggcggcggcggcggcggcggcgagcgtgtcttgggtgagaaaaaaaataagaaagcaggctgccgacgtcactgcgcaggccccacctccttcccttcgcctctccccgctgggccgtcttgcccttccgctgtccctcaacgaccatcttctcgcgagcgacccacagcacatcaacacactctacctacctatccaatcctcacccctcagtctcacctcaagccagcagccatggtcgcctttgccgctttcccaggctgtccgtcctcctcctccttctggcttgtagctcccgccgcccctccgagaccccactccggctgaccctcctccttctttctgtccgacagtcttcttctcgttcgcggcgatgggcctgctcgtcgtcgtcagcgtcagcgtgcccatctggaccaaggtcgacttcctgcatgcgacgctcaacgtctgtcccttctctgctccccttctcctcgctttgctctgccgggaccccgccttggcggcctagcaggggcaaatgagagcgagggtctcacctagcctccgttcgctgacctctcgcatccctcgcagtctgagcgcctgatcttcggaaactggggctactgcctcggcggcacctgcacgagctcgacgctcggctacaagctccagggcaccgtccagcagctgctcgaggaaaactgtctgttgctccctcctcttctgcccctcgcctagccgctggcgctgacgtctctccgcccccttccagacaacgcctcgatcctctcgaacctgacctacgccctcatccttaacccgatcggcgccggcctctctggcctcgccgccctcttcggcctcctcggcgtcttctcgacctcgcgcgccatgacgatcctcatgacgatcgcctcgctcctcgccctcatcgtcactggcgtctcgttcatcctgtcgatggtcctcttcgggtgagtctgcggcgctcgcgttctctgtattggagctggactgactccttttgccacctttgcagcctcgctaggagccgcctcaacgacgttggcgccaacgccatgtttggcaatggcgagtggatgatccttggcgccttcgtctcgctcgtgagtgctccgtactctgctctcccgctcctgctcgcgcagaacctgactgtctgccgctgctcgccccctgacagatcctcggcacctgcttctcgctctgcggctcgtgcggccgtttccgccgcaacaacgactacacgacgaagtactaagcgccacgcgtctgggaacccgccgttctgctttgtcgcaacccgctctcctcctccccccccctatcactctcaacccggcgcatgtacgcgtatgggctcacctaatcttcgactcaactgtatccctgagacctttgctcgtgataatcttgcatggcaaacacgtgacctctgacgcgcgggcgaaagggtgggcaatctttcaagaggcgctagatggccacgccctcgagcttggcctccactgctgcgggggcgggcgccggctcggtcccgtcggcagcagaagcggttgacggctcctctcccgcggctcccgcacctgagggaggagcagcaggcccctcgtccccctctgccttgcgcttcaagcccctcctccggccgttcgcaagcctccgccgcgcctcctcgtccgtcagatacgccgccggcccttcatccggcgcgccgctgctcctgccgtacgtaaagacgggtgcgggcggaagcatgctcgggtggaacggctggggctggccgaacgcgttgaactgcggctggtgggtcagggcgtggacgagttggaggtagtggagctgctgggcgacctcgtggtaggcgacctcgactttggcccgcgcgggctcggctggggggggcaaggggtgcaatcgtcagcaagggcttctccaggcaacgatggcaaagggggaaaagggaaccgacggaggttcggcagcttctgcatcatccggagctgctcgagctgagccatcagcacgcccgggtccttactctgctccttgggcgcctgagccttgcgcgcgagcgccttccggttcgcctttgcctcggctttccgggcggctgccgactttttcgtcgtcgggcccgcgccaccattggtctgccgaaagaggagagccggcgtcagcgcacggtgcagcgcaggaccatacctgaggaggaacgcacctcgtccgcatcctcggtcgcagagttgtccgtctcgtacttgcgccgctcaatctcctttgcgatgtatgcttcgacctttgccctcgcgtcccaatcgtcctcgagccggtcgagactcccgatccgctcctcgccgtcgggcgcgacaaagtcgtgctccagcaggtacgtctggatgcactcttcgcagaaggtggtcgcccgctcgggcgtcttgaccgcctggacaaagagacgcgtgcagattgggcaggcaagcgcgtcgtcggagggcgcagactcgcgaacctcagcttcggttacgagcttgggtttcgaccgctgctggaccttctcccaagtcgccctggagcgatggtgcgcgcaaggcaggcagtcagcaatcgctcctagaattccgctgaggggggcacgcacatgtcgggctgagcaatgacgaagccgccctcgggcgtgatcatgacgccgcccatcggcccgtcagccgggaccggcccgtcgaccgtcttgagaaacgagcgcgggataccagtcgtccgcttgaagcgcggcttgttgtcaaactccttgtcgtcgttggtcgggcagagctggatccaatggcctgccagcgggtcagagggttgcgtcagcaaggcgcaaggacagagggcactcctgtggactgaccacgctggccacatcggtagcagatgtagcccggtggtaggggcttgtcgatgaactcggcgacgaggtcccggctctgatggctccggtcaccaccgccgccacgacccatgccgccgccgcctcgcatgccgccccggccaccgcggatagagtagacgggcgttgcgctagcgaacacagatgcaggctgtcagtctcgctgcagcgtccgagaggacttcaggccggaacgcacgtcgccatcgtctcctgcgtctgctgccactgatcggcctcggcttggaacatggccgcaatcttggcggcctcgtcctcgccgccgacggaaggtccggcctggatctgcgggtatagcggctgcagcgagcaggagaagacaaggcaaggggtcagcatttcaccggaactgcttggcggcgctgcggctgagactgaccgcatcctcctcgcccttgccatcgaaccgccgtgtgatgctccggactggcaagagccccggcgcgcgtttcggtgccgccatctggccgagcggcccgttcgctcgcatgtgctcgagcgccgaggtgccggcgacgtacatcgctgccgtgccgcggccctgccgggtcggcggcagccggcggacgatgacggacgttgaacgggggatgatgaaagaatcgtccgtgtactctgcagagtggtgaggcgacggcaggtctggtcagctgtgggtcaacgctgtggatcagagcgacgcgacgcaccctcgccgttctgatcgtagaggccgaggtcaaactccttgccgtcgcccatctggttcgtcaggatgatttccttcttgagatcaaagaccgagatacccgtgccgtcgatcggtaggcgcgagtcctgccgctgcgacttgaagcggtagaagatggccgacatggcggtcgacgacggtgcgaggttgaggcgcaggcgggtcgggaaggggcgggtgagaggccttcaggcgagctcgagcacgagagagcgactgcgaaggaagcagtcagagcgctggttagcttcgcgatgcagaggcgatccgttcgcaatcctgacggctgtcagaggagaccgccttctagacgactgccctcgtaggagctcgccgtgagctcacgaggccgaagctcaggcccagcgaccactgctccgcccccgccccgcgatcgctgcctctttctggcccatatctcgcctcgcgattcagccagccttcagcacgcgcagcgcgatggagaacgtgactgccgagagcgcgtccatgtgaagggcgagcacgaggcgacggcggcctgcgcctcggcacgtgagtggagcgaagggcatgactgaccctcttcgaggcggcggtcccacttcctagtccgctgatagcgtctcgtatggattcggagctggctgccgagctgcgtttgtgaagagggagggaaaggtagaaggcggttcgacgatgtcgggaggccgaggtgcggtcgaggtgcgagtcggccctggtgggcctacctgtagtcgtgtatcgttgcttgcaggaatgcatcgaaaggggccgcgtttcatgttcctccggcgagagctgctctcgtccttcctccctcaacccctcgccattctgcggctcgcactcagctctcatgctcggcccaaccgtcgagagctgtcgcccggtctcttcctcaactacggcaagtccacatatggccgtgtcaaacgcggtcgccgacagtacgccagtgacggccggtccatctaccttgccctccgctgctcgccctcgctcatcagccggtccgcgactcgcatcgaccggacggttaggcagtgtcgcggcttctcgagaatcaggctcgagaccgccgcctcccccgagccctttggcctcaccactcctcggcaaggacacgctaaaggtcggccgagtcgcgcggcctgcgccaggccagctcggctcgccgctcgcactgccgaggggcgctggcgccgacacaacgctacttgactctccatcacatcaggccggtccttcctcagcctctcgaacggcgatacgagccggccagaaacctcgcatctcgcacactgctccaactgtccttgcgacgcccttgggctcagccggctcgggcgcgcagcggccagctcgaacccattcagccatgccctcgccagctacgccgactcggcctggccggatcactactgtcgcttcgccgcccgaggccggatcgcccagctctggagcagcagcgagcatcgtcgcaagccgcgagggcagtcggcgttcggaagcctcggctccggatcggggcgacgcttcctcggctcgggattggagcacacctggtcgggcgagtgagaacgaagccgcgacgattctccctggctcttccaagaacagagaaggcacggttgagactggcggcagctcttggccagaagataccgacgcggatgatgtcgaagtggacgaagaggtgcggggcgccgactctcccgtccaagactccgctctgacacgcttcttgcttcgacagctcgagcaagctctggcacaggtccggaatgtatcctcggccaaggctacggtctacaagcgtctgctcgaacaggtgcgtctcggtcgccatcacatctgattgcccgcaagctgaggagaggctgctgccgttggataccgccacccgccccagagccaaaacagcttctctgctcaggctcacgcattgcagactgaggtccaacaaatcaacatccagctcgaggcacgccgtcgtacgcaagatgtggattctcgggccggccgagtgccgttgacgccccttggccaggcagcgcagtggagcgtcgacgtcgatgacctgaggccatccggtggcaagctcgatcaccccaagattaaagcgtttgtccacagactggaagtctcagaacgattcgagctgatgctgctcatactcgagtgtgcgtgccggctgctgttttgccgcgcgatgcgctttggtcgactgactgacctcgctttgctttgcagcttgtctcccgggcgacattggccgcatgattgaccggctcgaacactaccgcaagactgctttcgaccttgtggcacaactgccgtccaagctaggtgtcgagatcctgtcgtacctgactgtgcctgacgtgctcggcaaggcctgcgtacgtttccaatcacccttctgaaatctgtccaggccgagtcgacgatgctgacttgaacgaagcactgtaggtctcgcgcaaatggaatgcgctcgtccagaggccagacctttggaggcatcacgccatccgcctgaccgagaccgaccccgtgcggccggtcgacccggccgacccgtcgcagtggtgcgttcgtcgatctctcagccatagcagcgggtcaatcattgaacgactccagcctcaaccgcccgcaggctcgagatctacaaaggtctccatttccgcgagcgcaactggtcgtccggcatcgcgcaagaggtgacctttcttcgagggcacacaaacttcgtcacctctctcgccctccatggctcaacgcttcttactgggtcatacgacgagacgtgcgtcgtctttcactcgttcagagatgcctctgctgaccttgctcggccgtaccatcgcaggatccgcgtctgggaccttgtcaccggctcctgtaagctcgtccttcaggccaaggcaatctcgtgtctccagttctgtccggaggaggaggtctttgcaatcggcttccatgacgtcgggtgcgtcctggaccctgccctcggcgcaagctactactgactgaacctctggtttatgccttccagacggacccaggtctggtcatcggtcacctggaagccacttcaaacgctgtctggtcatctccacggcatccgcgccgtcgcgctcgacggcacctatctcgtctcggccggcgctgacaaggccctcgtcgtctgggcgtggcggacgggcgccaaagtcatcaagtttggccagcagacgagcgtcaacgttggactcgagctcatcggtgacgacaaggtgcgcgacgccccgagtcacagtcttccttctctggctgacgctctcggcacgacccgcagatcgtgtcggtcacgctcgacggcatcatccgctgcttttcaatgtgtgcgtctttccagctgtcctctttgaaaagctggggttgactactaacgcccacttttgcagcccgacgcgagatgattgcccagtacaagcttaatgagctctcgccgctcgatccggacctctcgcagcgactgcagagcgtgggcggaggccatctcgggagcggccagctggcctggatggcagccaagggcgcgcatctgacggttagtctctctttagcccctgagccttgcgtagatcccgactgacatacgcatcacaaccttgaccagtgcgccaccaagaacttgatcatccacctcgagtgggagaccggcgagcgatatcgatgcgacccgccggcttcggtcttcgcagcctctgaagcgagccttctcaaaaagggcacgacgacgccaaagtcgcattcgacgtcggatctggccagcatgcgaggccagtcgtcgctttcgcccgtcgtcgcacgcaactacggccgcggccgcgcgtcatccaccgtcggatcacgctcacctgccacctcatcagcgactagcaagcctctagcagcatcgactgcgtcatcccttggctcagcgacgacggcagcggcccggccggcgtcgagcctgaaccggccgacgggcggccggtcaaggtgggtccccatcctgactcgtccgccacggataatcagcgtcgtcgatacgccggaggctagcatcggcacggttgacccgcgcaagaagcggtacgtctcgccaatgctagtcgactcacattcgggctgacccgccccctttaaaccgtctgtcgcagggtcgtcacttccacgcgcttctcgtctcggtctggcgctgagcgcaagatgcacgtctcgacttacgtgccgcggccgctccccgccacaagcatcgactcatcgccaggagcacaggcaagtgaaccctctgcggcgacaaaaggccgagttgcagaagcgccattgccaggcaacgagacgatcgcaacagcgctctacccttcggcactaggcggcgcctgggcaagccttccagagctggcgacgagcgacaagggtccgatgagtctcgaaatcgaccacgagaagattgtcgtcagtgcatgtccccaattaggggccgagtagatcatcgctgacgaccagacctctgattcatgtaggtcggttgcagcgacggtaccatctacgtcgtcaagatggccggccatcgcttccctggccctccttctgccatcgttcctgcatagaagcgcccgcgtgtcgaggtgtcgtctcgatttgcgaaagccgcgcgacagaactatgctacagagtctcctcctactttagcagcactacaatcttttgcgtttgcgccctactctgctcgacgcgggtgtgttgcgagtggacctcgacgacgcgaactcatcgacagcagccgcactgcagcacccgctgcccgcgcgcccgccggctcgccgctcagcttgccccctctcccgctcggactctatcgcctcatcttccctacctctcgacactctctcttgcttcttgtctcaccttccacctcggctctcggacatcgctcttacagagggactcgctcgcttcagctccctcgctcgcccgcctcgaaccatccggcaaagtgtcgtcctcagcctcgcgcgtcctccgagccgccgctcgctcccagctcgcccacggcatgtctggtgccgccgcttccgacatcacgccgatgctgatgccgccgccgactggagtgcgctcgtctcagccgtcgtccaagctggcagtgagcggggggcttaagatcctcggggcggcggccaaggaggctgcggcctcgagcaagcctgccggcgccagcggggccaagggcccagcgccgccgactcgcaggaagccggcgcccaaaggtgctcgatcgctggcagagatggcagagcagccgtcgacgtcgaccaaaggagggccgtccaagcccgagccaaagtggaaggccaagcaggcgctcaagaaccaggaggctgccggcgccggtgccgctccgaggccggctcagcacgtcgagcccctccagaccaactaccggtcgaagctcccttccttcgtgtcgcgggaccggccgccggtgcggatgtactcctccccactgctgccacattcgtactcgacggcggccgacccgcggtcgacggcgccagaaccctccgagctcaactcggccctgcacggcgagctgctgcggtcctgggtcggcagccagcctcggcccgagacgctcgaagcccgctcggttgccctcagcagggtcgcccgtgcggtcgccaacttttctggcagctaccagctggcgcttttcggcagcgtcgcgaacggcgtcgacaccgacatctctgacctcgacatctgcgtcatcgtgagtcgctgccctcgtgtacctacctgtccaggaggaggcgctgacatgtcgccgaacggaggacgactcgcggcccggaggctacgacccgtcgctggacgagacgaagaatcgcaagggcatcttcaacatgtacctgctcggcgacaagctggcgatgcagggcatgattgacgttgtcccgattcccttctcaaacacaccaatcggtgagcgcggtcttcttcagctccacccggtttctggctgacactgttgtctttagtcaagtgccgcgacccaataagcgggatcgagcttgacctgaagtatgtcccgtgtccttcttgcgcccggccacgcgctcctgctgacctgggactccctcgacctgctgcagcgtcaacgacctcggaggcgtctacaacaccaacctgatagagtcgtactgctacctatcgccctacgccctccggccgctgctcaacctcgtcaagaagtggggcaaggcgcgcaacatcgcctcgcagtgcgtcctccgttttaccggcaacccccggaatcgtcgccagccaccactgactcgtcttcttccgctctccgcgcacagatcgaccggcgctccgaccttctcgagctactgtctgaacctgctctgcattgcctacatgctcaacgcggtcccgccgaggtcgaccgacggcctgccgtacctgcccaacctgcaggcgccagagctgctcgcccagtacaacgtcccccggtcgtcgatcgacatccgcgtcaacaagagggctaaggtcgggatgccgatcaacacggcctttgtccccgtccatcagcatgcgaccggcggggccgacggcgcagcgtggggcatggacaaagagcggatcgccttctggcaaagccggaatgaggacattgaccttggcgatctcgccgccggcttcttccgctactatgccggcgtcgacggccggggctgggactgggccttcgacggcgtcagcatcctccaaggcgggcgcatcagccgcgacagcgatgcgaagcgctacgagctctcaaagatgggtctcgaggcggccgacgagacggcgatgccgaacgccggcctgatcgagaccaatgagggtcggaagctgctgaagtcgtggtcagaccaggcgattctcatccaggacccgtttatcggtgcgcgaggccgtctctttgctcgtgaagcagcgagcgcacgctgacactcgccgcccactcacgtttgactcgctcagtctcaaaggtctgtccgatgagcttggacgctggcccgtctgtcctagacactgaccttcttccccccccctctttcgcacttgccagaattgctgccgaccgatcagctttcagactgcggacgagatcatggacgagtttgagcgggcggccgagctcatcgaaccggacaatgcggactccttggccgagctctgcgagatctacaccggcaacagtatgcgcaaggtgcagccgcccaggcagggccagcccgactcgaaacggcagaggacgacgcgtgccgctagcaagaagggcgggcgatcacccaaagcccagtagaacctccttctatacatgggttcctcgacaagcttgtgcatggaggaggtgccaggcgccatcagcaatctcgtctctctcgtgacgcgcaaggatcgcttagcgccatttcattcatgccagcaagaagtcggacaggccgtttgggttcttgtagtcgtggcagacgacgctgacgagccagtacttgtcggcgatgtcctggagaagctcgcgcggcgccgaccgtggcgggtagaggaaggaccagtcctcccagaccgaaaaggcctcctcctgtaggaagaaaggcaagcagtcagtctgctgcgcggcgtcgacaggcggggaggaaaggggatattggccgcaccttccacgaaacaaatgacacctcttcgatgatggtcgactgaacaatctccttgcccgggaagacagcccaggtgacggcattgacgtcctcgggcgccatgttggtccggaagtcgccctgttgtacgagcaaggcgtcaatatcgagagcacactcgagggggataagaagctgcgacgacacccacccgattgttgccggcatagaatgtaatgatgccgttcgacttgtcggccctggcggcgagcgcgtcgacgacctcttcggtcacgaaaaactcgacaaacgccttttggaagacgtagccgccgcgcggaccgaacccatagacggcatcctcggaggggatgccgtcgaccgccggctgggagccgaccgtccaccagcccttgtccgagttgagcgagagcaggagaggcaggatcgccctcgactcggcgtcgagcggcgtggtgcaccaggggatcgaagggatgcgcgactggaggtacgaggtaaatatggtcgaaacgtcggcggtcgccgtcggccggccccagtgcgtcagtgcctcgttaggctgtagatcggggttcatgaaagatgatcagctccagtccttctccgcagcttcatctgccaggtcgtcgacgcaccagaattttgaggccacctccgtatccgtcaagctctccgtaggccggactgcgaacgtcggtgaagcgaccgttgggaaactcgtcccagctggcgtcgcctgccggtgccgtcggctggttgacctcggcgtggtgggtgtgatggaggccggccgctgccgcgagcgacgccgctgcagacgagatggtgaaggcagctgccggggcggatggctgtaatgagcgaccgtcctgctggatgaacagattctccatctcttcgaggggcgcgcctcgcgagggagaggggccgcgcccgttgctgccggtcgcagatggctccttggcgagccacgtcaggccctcgagcacgcgccagacacttcgttccaggttgagcgtgcaaaagtggacgccctcaaccttgccctcgctcacgaggcgctcgaccatcgagatggccaggtcgatcccgtactgcttgacgaggttgtcgtccgtctgcggatcgggccggcagcggtcgagagtcagcaagacgatggaagacgggataagagaaccgacaccattcaccttgattggctcgagagccgtcagaatcgagagcgggactgaagccttgcagagcgccgtcatccggcggaaagaagcgtagttctggatcggcatgacgcctgggatgattggcaccttgacgcctgtgccggagaatggcgcgagtggatcgaaagtcagcttttgagtcgaaacgtctgcgcttgccggtgtctaggactaaccggccgcgcggcaccgggccttccaatggagaaagatgtcgacgtcgtagaaaagctgggtgacaatgtagtcggcgccggcatcgaccttggccttgaggaactcgacgtcctcgtccccggtcgccgagtccggatgcgggtcggggtagcctgttgcgcaagaggagtgcacatcagtgacatcgctcagtgccagtgagcgctttgcgtcgagggcgagggcggaccggcaacaccgatgcagaactcgtcgccataattgtcgcggataaagcggacgaggtcgatggcgtacgtgaacgagtcggcctgattgacgcccggattactcggcgtcggcgacgtcggcaggtactcagactctcgaggcgggtctggcaaggggcgcagtcgcaaaagggcggggcccgtcagtgtcgtgcgcgggcagggcggcccgactgattccctgcgccgtgcccgctcgtgaggatagtggacgcacctccgcgcagggccaggatattcttgatgccgagcgacttggccgtctggtgttgacgagacgcgcagagacggcgttagcaagctcagggcggtcgtgcgcgccgcgcaccaccctcggccgaccgagggccgatggtgtgctgtgctctttgccgacgaacgcacctcgagtgcctcgacgacctttgcccgctccatgttggtgcaggtcagatgcaagatggcctcggtccccttgacgttgcgcgtgatgaactctgcgaggccgagcgagcgctcgctcgtgctccctccggcaccccaggtgatgctgatggctgctgggccaggcttgagcgacgccaggcggaggatccggtcgtgcaggttaagcgttcccggctgggtgagcggcggaaagaactcgtacgagtagctcgggctcgacgcgccggtcgactcatcgcgggcgccgaggtatgggcagggcgggcgaggcatcgtccgtcgatgtcgtcgtcaggcggaggggtcgagaagctgctgggctcggagcaggctgtcgtctttccgctcgtgctagaaaggccggattcgaacggaagaaacgggcttcaactcgcaggagcttcaagaagcgttgtggctcagacctagctcctctgcgttgcgtgtggctacgatggagtattgaggtaggcgaggagggagtcggtgttggagggagcagtcgagctcgcgcgcacgaacgagctcgtcggtatgcccctgaccacgaccgctgctgcctgacctctgccctagctgctctcgtcatgtcgactgtgagttctctggctggacaaggagagctcagagatcctgccgctgatcgctgtcgctgtatctctatcgttgataggcaagagactcgaaccgaggtccgtcgaggctctgtggcgtggacctgcctgtcgttcgcctcaccctgactgacgagttgccatctttctctcgcagtcctgttcgttaagaatctgaatttcaacacgactggtgagtttgtcgggcatgcgtttggaaggcaggtcggtgccagcagagctgatcgtccctctcccttctgctcggccccgcgcgtaggcgacgacctctacgagctgttcggccagcacggggcgattcggcaaatccggatgggcaacgtaggtcgaaccgaagcaacttgtgcggcctggaaactacgctgaatctgcccccccattccgctcctccttcagtcgcccaagacgaagggaacggcctacgtcgtacgtcttcggctagcgcgaggtgggccggctgcgacgggcggtcaaccgctgaccatcgcctttgggcttttgctgaacaggtctacgaggaggtgatggactgtaaggcagcaatggaaaaggtcaatggcttccacctccaggaccgatacattgtccgtgagtcgtggctcgttcctcccctcgcgcgtcgagcgacgccctgctccagatcggcaggctgaccttcgctattgtgctcgcccagtgctataccaccagccgggacgacaggcaatcatcgaccggaagaagcaggaaatcgaggagcgcgaggcggccgtcgccgaggagaagaagcggttgggcctggaatgaagcgctggctcctcggctctttccctcccggcatcgtttcctcttggccctcgtgttgtatctcgtatgcttgctttgccctttcgagacctgcggctagctttgagcagacgacgtgcagcaggaagacttcagatcacctttgagcggggacgacggagctggcggcacgtcggctcgactcgccgcgtccagcagcagcctcgcctcaccctgcaacgcccatcgaccgaccatcttgcctgccgttccggcctccctttctgcctcgcacgtcgacctgcctagcctggagcccggacgcctgctgcccttgttgcttctcgacgtcgccgcctagctcgccgctcctccgcccgtccgcatggccttcaggacgtcgtcgcccggtccgtcggagagcgtcttctcggccgatgagagcttcacgccgctcggcagcgactttgggacagacggctacgagggcgcacgaggtcagtcggaccttaggagtgttcccaacatctcaggcagctgctgacccccgctcttttggtccagctggctcgctcgccttggcggccgccgccggcccggtcgatctctcgcagctcaacctcgtcagcctgaaccggccttggaatgagccaggcgagagcaaccggcaagccttccatggtctgtcctgctgctgctgcacatcccgaaagagttccggcaagtactcgaggctgaaattggcccggtcgtccgcctttgtcccgcagccatcagcacggtcctcagtcacccgacgcgcaagccggcgccgcttcgggcctctcgcgtgcccctcccagccgctcctcagccagacccgatcccaaaggtcaaccggagggacctcgatgcgtacctgacgctcgtcggccccgagtgggagcggtaccaggcagcgatgggcgcgggcggcagcgccctcgccggggtcagctctggcttcgacgccgatgccgcactcgaagagcgacgaatgtcgtcgtcggcaatcacgacgccctcgctccggtcgatcccagacgtcttctttgacgacgacttcaatctcggcaacccccacacgttctcgctcgtcgctgcgctggcagaggccccgcgtcggcactcgctcgcctcgccgaacgcgtcgttcgcgtcactgccgccgatactcgagcctctcaacgaggaagcgtcgctgcaggagagcaccgaccggtcagactcgaatcctgtagaggaaacgaatacaccggtcgacctcgacgacgcaggctcgagccagcagctccaggcgcgactttcaacccatctcagcctcgtcgagcagcacctcgtcctagagatctcgcagcggtcggcgtcattcttcacagcgctcaccaacctgcaggacctccagaccgagtcagagtcctgtctctcgcgcatcgagtcgctccagcaggagctgcgcgcactcaatgagggtcacgcccaaaagggtctcgaggcagtcgcgctttcgcgctcgctccggggcctcaaggctgtcgatggcgccgtcaaggagatccggagcatcgacgaggccgtcgcaatgatccgccaactcgtcgcgaacgacgacgtctatggcgcgctcgacctctgggaggaggtcgacggctggctcaggcgcaagggcaagccgaaatcggaggtcgccgacacgagtgccaacggccggcgtcggaaatcctcgaacgtctcccgcgtgcgctcgtcgtccctcctaggcgaggtcgccgaagggggtgaggagggcgaggatgatgccgctggcgaggtgtccagcccggctgcccccacgatgcttcagccgcctcggctgcgccggcacgagtcgtcttcgtctttgatcggccagtcttcgcgtgcgcacaagcagcagtccgaagtcgatctcacgacgtcggctgcactcgcgcacctgccacagactctcgccgcgctgtcgctttctctcgcttcgcaacttgagctcgagctcacgggctttctcagagccgagctcggccacaagaagcaggcgaccgacgtctcgctcgaggatcgactgcggccactcctcaccggcctcattcgcgctcgcgagagcagtcggattgtcggtgtcttcagggaaattgccctgtcagaggtccgcgatgccgccaagaaggttcgcacagcccgcctcctttcctctcgaaaggagagctagccaggactgacagctctactacgcgtcgctttcagttcgtcacgtccgatcagtcagagacgtctgatgctacgtcgtgcgtccttctaatggatcgcccgcatcggacgcctagctgccgctgacgcacacacttcacttctctgtcttcagagccgcactcgccaagcgtctcaagggcctatcgcacgccgatttcctcgcaatggagacgtccatgttcgacgcgctgctcggctgcctccggtctatcgacgtcactgccaaggcgatcgaggccgtccttttagactctcggtgcgtcttccttacaaaggattactgaaaaacgacctctttgggcatctgtcagagctgatgctccaccaccaccctttcggtcttgaccgatgagcagagcgtcgatcggcttcatcctgagctcccctctcacgcaagagctgcacgacgtcctcgccaccgccaccgagctcgcccactcgcgcgcgtccaaagtcgtcggcgtccgcacggaccagcatgcgctgctcgccctcgaagacttcatccgcatgttcaacgctgtctgggcttttgtcgtcgactgcgaggtgctctgccagaagatgattgttggcctccgagggacgatggtcgtccaggtgcgtgtctccgcccctgcagcacctatggtgacgacagcagctgatacatctctttctttctgagcaggccaagacgttcctgcagacgtaccactcgcagcggctatcttcgtcggcccgcctggtcgaaaacgaaatttggtcgcccgaggagcccacggccactcagcagcacgctctcaatcttattctcgagaccgcagtctctgaccctccggagctcgtcatgtgcaaggacgagtcgacgacggcaaacacggcagcagccaacaacggcgtctcgtctggcggcaagagcagcacgctgaggatcgaagaccgcagtttctttgtcgtccccgcaacctcggcttcgatggagttgctcgtcgactatctccggctcatcataaacattgagctcatcacgatggacgcgatggccaaggtcattgagtacctcaaggtacgtcacaccggagctgcctgtccgagctgggctcacgtctgactctgctgctgtccgccgccggcagtcgttcaactctcgtacctgtcaggtcgtcctcggcgccggcgcgatgcgctcggccggactcaagaacatcaccgcaaagcacctcggtgggttcttttgctcaacgtcgcgctgcccttccgtcatgagctgatctgggctgcctcaccacgtccagccctcgcatcgcagtcgctctcggtcatggtcacgctcattccgtacatccgggaggccgtccggcgtcatctcagcgccaagcaggccgtcatgctagtcgagtttgacaagctcaagcgcgtgagtgggctggttgcttctcgactcagtccagctccggagctgaccctgttcatctctggcctcctccaggactatcaagagcaccagaacgagatccacgccaagttgatcgcgatcatgggcgaccggctggcgattcacatcacgtctttccacgtgcgccacatcacgccttgctctcgcttcccacccagagcagctgaccctggtactgctcctttctgacaggagattgactgggaggcgccggctccgaagctcggcaagccgagtgactatatcgagatgctcatcaaggagacaacgcagctccacaagatcctctcaaagtatctgcccgagtcgacggtcgaggtacgtctccggcactatcggcgatgaattgcccggcgctgatcatcaatccacccgacagctcgtcatttcacaagtcttcgcctcgatcaacaatggtctcgccgaggccttcaccggcgtcgagttcaagtcggacggtgcaaagagccggctcgcactcgacgcgatgcacctcgtcaagcgcttgtcggcgctcaccggcgtaactccgatcccggcgacgctgcctacgttggtcaaggacaagcccgtacctcggcaaccgggcggcgccagcatgaagaacttgatgcgacgcgtcagcagccagggcaagatcggcgacggcttcgaaggctccgaaggcgttgccaaggttgaggctggcgcctctacaaacgagcttcttgcaccgcccggcgcctcatccctcggaacgcccctctcctctctaaacccatcggaggtaccctcgccaagaggcaactcggagagccagaccccttacaccgaccagggcctcgaggccgccttgcaaagggttgtctcgccgcttaacctgcctcgccggtcgtcctcgatggccccctcaccaattgcactgggcacgccgtcggagctgccgcccttgccgccgacccccagtgctctggacgcgccgacggacccgctggaagctgaggaacgtgtgccttcctcgtcggccaccgccgccgagccggtacctgtcaccgccgtggtcgaatcggcgctgcctcctcatcatcctgcgcagccggcgaccgatgccatctcacctgtcgaagctgcagacgcccaagacgccccggtcgcactcgatctagaacacgaacaggcgtccagcggtgtcctctcgatcgacgcttcggtttcgtcctcgtcaggggcgaccgaggtgccgtcggcgcctgcgacacctgccccgttacatccggtcgaagccccagctgccgaccagacgggcgatccttcatccgagacctcgacagcagctgttgacatccgagccatcgaggtagagacggttgccgatactgcaccggctgccctggccacggacgagacgtccactatgccgaccgatgccacggcagttaaggagcagatgccgggggtcaagtctgagatctcggccgcaccctctaccgacgcccctctcgcagtcgctaccgaacaggaagttcctgtcgaagcaacgtttaccgacaaagctgcagccgaagattcggcggagcagtcgccgaccacagccgcgccgaccaacggcgacgacgagaagggcttccctgcgttagtcgaacctctactcgacgacgctcaaaccgactctgcgaccatgcaactcgcggacgacgagccgacttcggccaacggtaccacggacggcacgccggccccggagccggtcgcgtcggaagagccctctgccgccaactcagaggcagaggatgaagtcgacgcaggagtcggagaggctgttgccgtcggcggcgccaagaaagccaagaagaaccgcaagaagaagaagaagggcgcgaagagtgggaggacatcgccggcggctgccgagcccgggacagagatctcatgattgcacgaccctcgacgaaaagtgacgacacggctacagggctcgggctgatgcgaaaccatctatcgctcgctcaaggagccatccgcaccgtcatgcgtcgccgcgagctcggctcgtcctccgaggagaggaccgtgccgtccatcatgcggacgagccgctgcgcgtccgagaccgaagggaggacgagcaggaactcggtcgagtcttgcgaacgagacctgatcgagcaacgaggaagagtcagcacaagcacgtcgcgagccggtcacacgacctttggcagcaggacgaacggcagcttttcgatcgaggctccgacgagcgacttgccgagccagtcttcgactcgctccctgccgtggaagccgtcgcgctggccgaagaggctttggaggcgaaccgacgccatgccgctcgcgtcctttgcgtcctgcaggagggccatcctgtggaccgttggcgcccgtcgaaggaagttgacccagctgccatagtcgggccgggtccgcaagtggttggtgaggaagctcgtcttgtagcgtgccggcaggcccgagatgtggaccctcgtcggccgcggcgcggacggcctatcgacaaaggcgagcgtgtcgggcaaggagccgagaaccgagcgccagctagtggccttctgccggccgggcgctgtcggccaggctggcagcagcgagaggaagcgcgtccaggcgagcgcccgcgcaaactggaaggccggtttccaccactcggtctcgacgctggtcgactcggcctttgtccgggcctctgctgcctttgcctcttgcgaggtgaaaaaagctgggctggaaaacgtctcgtcgtgccagaggtaggcatgcgggtcggccgccggcatgaccctcggaacgtggtcgaccggcggcacgggcttcgctgcccgccagctgtaggatgcgagcagtcgatgaagatctttggccgtcgcatgccgaaggctgaggcgacgcggtccggtatcggactggatgctatccgcggcgagcagccgatcgaaggccggctggagaacctgcgtgccgtgggggaagatgaggtaggcgctcgtgggctcggcgcctactttgctgctagccttgagcgggtggatcatctctcgcagatgtggcgttctgccctgctccgcactggggaaccggacgaggccaagcaagtcacgttcgaggccgcgattcgatttcctcgggaagcgggcaaagaagtgccagccaaactcgtcgcaaacagcctcgctctcgaccgagagccggtcgatcggaagcgactcgcccgcccggcccttacccttgccaagggcggaccagataggcatccaacggtagtagaccgggttgccatcctctgcccagaccgaagaacaggcggctgtcggcgacgacgaccgggcgaggatcgaggaggagcacgtcaacgcttcgggctgctggtggcccaagggcgggaacgcgcgctggatctgctcgtagaccctgagagacagatttgatgcgacagcaatcaaggactgtccgtctgcgatgcgacgaaactcgactgtcaacggcgtcgcgtcggccggtcagcggaccgtttgccgcctggtacacagatgcgacggacgacttacgaggaggtacgtctcgttcgtcaatgtgtgcgagtagccgctgatgcaggctggacgcggtcgtatcgaatggcagccccatcagcaacagcctgtagttgtcctcgccgaccaccccgcctttgcttggaatggcacccggcgtagagaagtaggtcggctgcggagggcgatgaatctcgacctcatcggcgaagctttcctctgcgaaagggagtgacgaggaagcccgagagtcgtcagtggctgtaccctggaggcgtgttaggaccagactcacccagctctcgcgcccgctgcagctggagaggagctgccggagtccgttcttttttcttggcaagtatcttcgctcgtttcttcagccgctcctgcttttcaacttgcttctgtctgcgttttgacgacagcttgtcccgcgtgcgcatcccgggagcggcaatcaagggcaggatttgagaactgcgcgtcaggccagcttgtttgcggaccggcggcgtcgacgctgcggcggcaccgaagcgatctgctactgccagaaatggaggaggagtccgctttgcggagctgccgatcgagactggaggtgggctgacagtgggtgccggccgcttgaggtctgcgacgggagtgccttgaggcgccttcaggcttgtcgaaccggtcacgacaaggccgagcttcgacctggtcgtccgcgacagatgcggaggctcttcatgcactgctgcggccggcagaggaagagctggagggttcgaggacgagaggcgtcgcttgggcaacttcttgcccttcgacttgtctggctgcttcgagggctgacccgaggccgacgaaggcgctggcggcagggtagaggtggaagcgacaggctgcatgttgagattcgacggtccggcctccttggaggcggcagctattcagcgcgaagaatacccggacgagattgtcagcatgctgtgagaaggaagtcgggagcaggggaccggttgcatgccgacgcaccgagtgacagccgctccgatgactgcttctccttcttagccgacttcctccccttcttggccggagggcttgctggagctggcgttggcgtaggctggccacgagcgatcgagcccttgaggccgagcggcaggccagtcggttcagggtgcttgccattggccttgattgacccctgagaggttgagctctggctgccagacagcggcgcgagcaggctcgagaggttgggcattggcagcgccgaagccgccgcaagcggggcggtcgcgacagcaaagccggtataggacctcgaccgactcgtccccgaccggagaaggccggggccgagctggggcgggcggcagggcatgctgggaggttgtggctgtcagcgatggtgtcgcggcgtcggcccgagcgagctcttccctcccgcgggcggtcgaaatcgacgagggctaggtctgatctcgaaccgtcaccgcgtcacctcctccgctcgcacctgcccgtctgtctgcccttgctccatgccgttcggtcagctcatcatcgggccgccaggtcagtgcggctgttgctctcgggtcaccgagtttcagagcgttgctcacccgaccggccgtcgcctaactctctcgcccagggtccggcaagagcacgtactgtgctggcctccaccagttcctgacggcctggggtcgacccgtccagattgtcaacctcgacccggccaactacacgctaccctacccgtgcgcgctcaacattgccgaccttatcacgctcgaggacgtcatgcgcgaggaaggcctcgggccgaacggcgcgatgctctacgtgatggaatacctcgagcagaacctcgactggctcgtcgacggcctccgtgggctcgacggtgactacgtcgtatttgacgtccctggccaggtgtgtcgccggtgctgagctcgtcctgtaatatcacgcttgctgacgcgtcgcattgcgttgctctctcggccaggtcgagctcagcaccaaccacaactcgctcacgcgcatcatggagcacttgcggcggctcgactaccgcgtacgcctctctctctttgcgctttgccgttccgctagtcagactggcctgaccagagctaccttcccttctctttgcttgcgtcagctcgctgccgtgcatctgaccgacgcgagccacattgtggagccggccaagtacatttcgatcctgctcctctcgctccggacgatgctccagctcgagatgccccacatcaacgttctgaccaagatggacatcctcaagtcgtttggcccgctcgccttcgacctcgagttctacaccgaggtacaggacctctcacacctcgcgcttctgctcgagcgtgatccgcgcatgcaccgcttctcggcgctcaacaaggccatctgcgaggttgtcgaagactttgggctcgtctcattctcgacgcttgcggtcgaggtcggtccgcgcgctctcctcgctcggcttgcgctatggctgaccctctgaccccacggccgccgccaccgtaggacaagaagtcgatgatggcgctcacacagaagatcgacaagatgctcggctacgtcttcatcaacccgccgccatcctcgtcatcagcaggcgagcccgcgccaaacccgctcctccaggcggccgaggccgttatccccggtcagcacatctcggacgtccaggagcgctggctcgacgaaaaggaggcttttgaccgggccgaagacgagcagtggcgcgaagagggcaaagcgctcaacgtccgcaagtaatgactcgttcctgctcggtgcggcttcctgacagacggcgtcggccagaccgctcgccatacgcaagcttcaaccccggccggctatccgagcggaggcagtcccgtacttgcaggcctcgtctgcatctcgccctcctttcatccgacgccaatggcgcgcttggtcacttgtttgagtcgcaaaggcctgaaccgagaccagcgagggcgtcgcttcagatgcgtccctctctctctctccacgaggacgttgcagcgcaacgacaaaccctagcagcccagcacggcctcagcgctcggggtgtgactgtcgacccctctcgttgatccatgagcatgacacgtcaggccttctggaatgaggggcgtcttttgactcgttctgggtgtccctctttgacggcgctgaagacccgcggtcagtcgagtattcagatccggatcccgcactgaggcagtcgtctttcaagatacgcaagcaagcaggcaggagatgttcgtcacgcaagcattcatccaagacaggaaaacgctcaagcggactcgccaccagcgaccgtgaggaggtcggagtctccggcgtccgaaatagtcatgacaccgacgcggaagaggcggccggcagcggtaccgagcgtgacgttcgtgccctcgtaccggtggacggcagtcttcgacagcatctgagatgagaaggaatgaagtcaggatgatggtctttccgcgcaaaggggggaagcgcacgcacagcgtagtactcgatctcagcccggcgaagaggaggggtgttcttggccaggaggacgagcttggctgcaggtggagaaagggtgggcggagggtcagataatcgcgagggtcagatactcggcagtctttgggcaccgagtccatcgctgcgtctgtgcggtgacagacactccggcaagagcctcctctcccacctccacacccgcctgtgaaggacaaggcgcagaggcttgaagggagcgaggcccagacaagggagaccggcaagcgtctacgaatcgaggggaggggggtgcgtacccttgccagagcgcatcgacttgagggccgacttgtagccgagctggtacttgccagacttgatgacaagctggagccgggagttgatgttctccgagttcttggtggccttggacttctgttggccagccgagcgaaggaagggtcagcgctctggccactgcatcggagctgctcgtgcgagctgggcagcctgcgagaaagcacgacggaccttggtgggagccattttctggagcggcaggaaatggacaaggtgagcgaaggattggacaagcaggcaagagaggacgaaaggacgaactgcttgctgtactggtgaggacgacgagacgagggacaggggcaagagcaggcagggcgaaaaagctgtctctgcgcgcgggcggcggcgcaggcgagacgtcggcgcgcagagacagctttttcgccctgcctgctcgcgggcgggatgggtgttggcaggagggcgagagaagggctggtcgttccgagattgagctgagtataggacgctctggcgattcggaggggccgacgcccgcgcggtgtcagcaacgtcgccgacgctgctctgtcagacgcccggctggatgtcgccctctttagacacagcaaaagtgagcccatcagctgtaggcaaggactctgccagcacgcccggcctcgtcttgcatcgctgctgatagtgctgcctcgttcactgctctcacggcaggagcacagccagcaggtctacagaggccgacggcgggcatcgcagcgcagcaaaggggcggctgagcaagtcggcattcgttcgtcccctccccgtgtcaagcatgacgaccgaagtcgtgctcgtgcttcggaggcggcgctacctctggcggagagatcgaatcggagagcgacgatcaaggctgccgccttgctgccaaggtttctgcggcggcagcgctcggccggctccgctcgctccatgccttccgacgagcaacagcagcagcgcctgtcgcaacgaacgcctcgcctcgcgcatatcgacctccctcagctcgacctctcgctgcgtctctccctgctgatggccgagatgcatgacagctcgaccgaccgaccggcctcagcgggcagatgacccttctgccgccgctgtccgtgcccggtcctgctgccgtcgcagctctgctgccgccaaggcgtcgctgccccacctcaagacacgcgtcaccgagcagcggactcttcccacgccgccgcgcccgcggccttgggtcggctcgtccctctccagatgctgagcctgctcccggaaagggagagagaggcccgaggaggtcggaacttcagagggaggaggcagcttatcctcgctcacccaccactcacctcctgccagctcatccctacacagcttaatctccctcctctacatgctgcgacctcctcctcgcttcaagaagttactcgccggcctcgcgctggtcctcgcctgcgcagccgagccagccctcgcgctatccgacgccgcctctgccggtgagcagcccgctcgccgctcatcgcccgtcgtcctcgtcgagctgagctgacgaacgcctcccctctgcgcccatccaggcgatgatctcccgcacgctcgacggctcggccggcgccgcaacaactatacgaaccacgcgccggaaacgatggcctacctggtccagttcaactacgacgtcccgatgtacttctggtttggtgcgcagtctctccacctgcgccgccctccggcgatggcccagactggtccgctcaccttcccccctactctcaggcctcatcggcatgattgcgattgcctcggcggcgcattggattcagtggcttcaggttcgtttgacacgagctggcattgcgcgacaggcagccggagagctgacctcgtcaccatcctctcaacagggctactttcgtcggcggcaggccggctaccgccaggactccaagcggctcccgcgcgtcaagacgcacgcctcgggcgaccagccgaccgttcaccacgtctcgctccggtacgtccctctgcaggacgtcaggtcttaggcggacgactctctgacggaccctgcgcgactctcgaaaacagcttcttctggtactggctcgcgtccttctggcgcaagtactcgatccagcacagcaacattgccgaggccgtctcgctcggcgacgtcggccagctcttcctcatttttgtctacctccttttcaactttctcctcatctttctcggcaccaagggcgacatcgactggatggcgcaccacgccgcgcggttgacgtacgccaacatcccgctcgtcatcggcctcgccggcaagaacaatgtcctgtcgaaggtgcgtcaacctgaggcacagacgagtcggtgccacgtgctgatcctccttaacgcccgtctctcgctcgcagctcaccggcttcgcttacgagtccctcaacgtccttcaccgatgggcggcgcgcttcattatcgtcagctcggccattcacatcggcggccggatttatgtacgtcgccttggctcctgtactctctgctgccggtcggctgacgttgttttctgctcgcaggtaaatgtcccgagctcgagtccgacggcacccgcttctggctacatcggctggggctgggctggtgcgtcgacaacgcccaactgttcgcccttgccgcgcgctgatgctgatgctctcttcccccctcccatagctttttcgtgtttccttctgtaggccgctttttcaatggagctagactgtgctgctgacggctgacaaacacactgccctcgcgacaggatgatcggcatcgcctcgcggccgatccgcaaccgggcgtaccagacgttcctcatcctccacgtcacgctctggttcatcatcgtcgcctcgctcgtcattcaccggccacaggaccagggctggatttgggctgggtacgtctcttgcctctcgacaatcccgcctctgttcttcgctgatgcagctttgaacctcgctcagatttgccctccacggcctcgaccgcatcgcccgcggcttccgcatcttctactatcacgtcatcaaaaagacggaggagcgggatgatctccctggaggcgtcgtccgcatccttgataaggacacgatccgcgtgtcggtccgaacccgccaaagtacgtcgccagagtcgttatgggccgctcttgatgctgatgaatcccctgttcgacggcagactggaggcccggaactcacgccttcttgcatgcgcccaaggagtcgcctggcggccaccccttcacgagtaagtcgaccgtcacaagggcccatccaaggcagaagtctagctgctgacctgagccccgctggccctgcagtctccaacatctcgcgtccgctcgaacaggccgacaaccgccggccagccgaggcgacgcaagaattcatcattcgcgtgcgcgagggcctcacgcgcaagatctttgagcacgctgacggccaccgcgaggagggcaacgaagatgccggcccggcctggggaacagatgtcccgatgaaggcctggacagagggaccttgtgcgtctctcttcgatcgctgcaggcatgtcgtcgtctcgctgactcttcatccatgtgcccttcgtgctcttgtcagacggacacgagtcctacctcggcgaggactactcaacgctcgtcctcgtcacgggcggcagcggagtcagctttgcactctccaacgcccaagatattgtccgtcgcaagcgggcgatgtacctcggcaacgcctcgcgcggcatcgccatcgccaccgagcggctctcgttcatctggatggtcaagtctgccggtgcgccctcgtttctgttcccctttctgcaggataagagtgattgacatctttcctctcccgacttctgcagcccaagttgagtggatcggcgatcacttgcgcgacatgtgccgagctgcgccgcccggtttgctcgacatcacaatctacattaccagggatcggacggctgacgagcccgaggtgctcgagggcttcgtcactgatgacctgcgcaagccgcgcccgaccgctgccgaagagggcgagaaggctggtgagaagcagcaggcggagaaacgggcgccgacgcccgacaggcggacgagcgggacgacggtcgtccagcacaacgccaaggtgatgctcaagagcggtcggcccgactttgacgagatcgttgaagaagaggtcgcccgaaccgactacgacgagtggatcgcctttgggacttgcggcccaggccctctcaccggctcactcgccggcgccgtctctcgcgccgtccagcccacccaggtccttcgcggagagcttcgacggaacatcacgttcgagatcgaggagtacggcatctgattcgaatgattctgagtctgcctgtggtgcttcaaagaggcagcttgaatcaatttcgcgggctgctgcgcggaccacctcgagcgcgggcagaggtgtgggctgagtgccgaccctccgagtgggcatgcaatgcttcaggaagtataccagatgcggctgaatagttatctcgagcgggtcctccctgtatgctgcctgcagattgaagtcgagaggcaacatcgacgcctcgccgtctgcgtcgaaggcggcggggcgctcgcacggcaaccggcgtatgtgacagccggcttgccacgggcgcaggccgcttcttgcctccctccttcctgctccctctccatcaccagcccactcttccctctgcaccgtctccagccccttaatcaacgtcagctccagccctcgtcatggatatcgtccagcagatcatctcttcgtgcgtcccttgtgagccggctcgccgggcgcgtgccggcgctcgctccggccgacgtctccagccccgaagctgagccacatgccgatgggctgaccgggcgtgcttctctctctgtccctctggtgcgacacctgtgcaggccgcagtatcatgactatctcggcattctcaagggcgcgcggaacggtctggtgcgtctgcctcgaagatcgagggtgttggtcgggcgaggtcagggcgggagctcagccgggctccgagggagcagggggctgaagacaacctccctctacgtctcctccaggtctacggcgccaagatccggtgggtctcgagatctgtgctggctcgcctgtcgccttaagctgacagtctgattcggccagcttcccgcatgcgctcgtcatgacgcttctcttccaccgcggcgactggcgggctaagtcggtgcgtggcctcctgcatccttgagagcaactgctggcgggctgaccacgagcattgcccctctcgtcctcaggcctttatctacaaggcgacaaagcagcacgccttcaacctgatgaagtttgtcagcctctacaagacgctgctgctcattcagaagcgggtcaacggcggcaaggagcgcggtgcgttcctgcaaggtcatcgcttccgcgtcgacgcctaactgacacctctcttgggcctgctcagacatggatacgtttgtcgccggcctgctcggcggctgggtcgtctttggcgagcggaatgctgtcaacgagcaggtcagcctggctgcgcgcccgccctttcaaattcgtcgtccgactactgacgcctgaaatcctgcagatcgtcctctacgtcgcgtcgaggtcagtgtctgtcacccgctgctcgacctactctactaactgaccttccttccgccttctcagagtcatcgcgtccttcctgccccgcgcctcgccgcgtcctccgacaccggcggacggcaagccgccgagtgtcgtcaaagctattccacctgcctcgctcccgttcagtcagtcctccctctcgatgctccggcccgcgacacccttaaagccgctgaacggtccatgcctcgtcctccgccgccctgagcaggcgttttcgcgagtgtcgcctggggccttgtcatgtacatcttccgccaccggggagagactcttcaaggtgcgcttgactgccttcctgcggcgctgctcctactgaccgtttgcgctgggcctctcgtcctcaatagccgggctcgtcaactcgatgagctacctctaccgcgacagcgagaagtggaaggacctccggacgtgcgtgcgcctgcccgcgagaccgtccaacagcgcacggactgacgctcctgtccttcgtcctggcagactgctctggcacaacaagtgatgggccgacgcctgtcgatttgtccctcgtcgcctgcctggcctcctcgcgctgtctctcctccgtcgttccggcggctgccgcccgtcttgccctcttgcctctttgtatcaccctctcagccctctctcgctctatgtctcgcactctttgcctctcaaagacctctcatttggatcccctttggccggtcgtctcgcagggaggaaggggcagggagaggccggacccccgacggctggggtcgatcgggggctcgaaaaaaggccgctgcggggcgagcgacccttgttgcgtctcgagctgctcgccgagctggtcgtcccgactcttactgccagctctctgcatcctctcttctttccttcagctcagtcagcaacgccatctagacgctccggccgacactctagcgatccagctaaccccgacgcccctgccgagagaccttccccgtgcccgccatgccctccgtcgccgagcgaagcaacgcaaccctgtacccgtcgacgacggccgactgggtccagcccgagtcgcggcctgccgagattgacggcctgatcgccggcgtcggtcggtcctcttcctcgtttctgatcgtgcttgcggtcctggaaagacccggctgaccctctgccgccgccgcctgcgccagaccgctacaacccggccaacgtctccgagctcgaggactacctgtacgaccaggtcaagcggggaacctacgacttcctcgccaacatggcgacgctcaagctgtcagtccttgacggcctctccgctcgtctgcttgtcagctgacgaggtccgccgccgcaccgccgcgctcgtccccatcagctaccagttcaacccgacgctcctcaacccagacgtcctcctccagctcctgctcaaggcgctgatcgccacgcccaacccggacttcaacctctcgatggccgttgctggcgaccgtgccgtgcgttcgctgcagcctgcatcgggcgccttgcgcgctaccttgctgacgaccgccgtcttgcccctccgaccccccggcacctcagttctcggtcccgctgtcagacgacgacgaggacgaggactcgcaactgccgctgctcctgcccttcctcaccaagctccactcgattctccgcgcatgccgcttctccgacttctggtcgaccctgaacggcgacgaggaggccgctgtcggtgcgtctggaccgccgccgccgtttgttcccgaggcaatgaaaggcatcctgacctcctctacctgtctcgcagtcctccgcggcaactcgctcgccgagcacccgctcttcaactcgcttatccggacgaacgtcgtctcgcgcgcgatcgcctcgacccaccagcgcatcccgctcgcgctcgccggcaagtggttcgaccttcagggcgccgagctctcggcctttgtcacgggcgagcttggctggaccgtcgacggcgacgtcatctcgatcccggccaacgaggacaacaacgtgcagggcaagaacatccgcgagacggtcgagctgccccgtgcgtcgtctagctctgtagttcggcccgacttcctgcctcgacgactgacgctcgatctatccccaatccagagctcgtcaaggtcatcggcgctggcgcccggtaggcgagaaaagacgtcgctgagcgtttagattcgatgactgaaaccgcagctctgggcgggacgggtggccgtggccgggagagggcggccgagggcgtgttcgcggagcgctctcaagagctccgaacggttcagaaagtcgcagcgatggcttctgttttccctgcgtgctctgtcgccgcgtcatgacgccggtactgagcgccaggaagcgttgcattcagagcttggtcggctcgcacaactcgcgcccgagagggaccaggccgtcctcttcgtcgctctcggctgcccggagcgtcacctgcgagccgtccctgtgccgggggctgacaaactcgagcgagtcgtcgaggtcgccttcgccgtcggacgagccctgcgacgagagcgctggtagggatgaccgatcgcgggccagcggcagaggtagctcgaacggagggaggtggcggtaggccgtggccgccagcggcacggctccttgagttgctgcaggaaggtggcggccgaagggagcgtcctccgtgccgtcctcggcgtcgagcagcatctcttgctcctcctcgggctcgaccgcacccttgctccggcggaggacgcgcatgagcccgtcgagctcgaggatgacgtcgctcatgccgcgcgggcccttcttggcggccgcttcggcgacagcccgctgcgtctccacacgatgctccctggcgaggcggatgcgttcctcgcgcgtcatcttggacggcggtcgacggctcggtcctggagcagactcagccgcaaagagcttctctcggccaaccgaggggagggcattggccgtttcgcgcaggtagcggctgacgtcgtcctcgatctcgacttgggcaggggccgatgagtccttgggcgcgtcggcttgagcttcgtctgtaccctcatttgggctgctgacatcgagcggccgagttgggatctcgcgggtttgaccgacgagcgagccctcgacatggatgcccatgccgacccgggcacgctcccagacgcggatgagctcgcccaagtcgtctcgcaactcgagccaggtcggctcccagccgtcgcccgactcgacgctgtcctcgagcgagccgaacttgccggtcagcagctggaggccctcccagagctgaccgaggctcgcctgccgctgctgggccttggtcagcggcgggggagcgaacgagtcgtcaccgtcggcgccgccgccgccgccgtagaactggccggcgatgagcagggcccgcgcgacctcatccttcgcgtcttcgaatgccgtcgcgaggttgccgacaaaagtagccgcctcttcccaggctacaacaaccatgtcacgtcggagagcgaggagggcgacaagcaagtgccgccggcgggtatggagcgcccagaacgttgtcagaaggtccgcatggctgagcggtaccggcgagtcggactcggcgtcacagaggccggccaaaggctctgcagccgtcagggaagccgacagctcggagagcgccgcttgctgctgctcaaatgccctcgcctggaggtttggcactgaaggcgaggtgagcgagagcgtcggccggtgacgaggtctctgctggcctggtatgggcgagaaggcaccgaagaccggccgggagccagccgcatacgagaaagagcttcgcccggagcgcatgctccgcagccgcgagagaccgccagtcgtcgagcctggcgggctaatcggagggaacgtcgcttcgccgggcgatcggcgcgatgtaagctgagcgagtggcgaagacgcatggcggtacgtgatgtcctggagcgagcggcgtttggcactccgactcgtcgtcgtcggctgcgatagcgtctggagctcagagtccgcgatgaactgcgggcggtcgctgccgccgcttggcgtccgctggaggtacgatgggcgaggcatccctggcagaagaccgctcgacgacgccgaggcgacgatggcagcgtcctcctccgactcgtccagcgacgggtttcgggccttgtggccggccgtggctggctcaggagagagcgacggagacggcagcaagctcgagcggggccgaagccggctgtcgccttctgcaggctgcggcgaaggaatcggcacgaggggtgaccaggagcgcaagaccatcgacggaccctcgctggcggctgcagcagcggctccagaggaggcccttccgtgtctggccagtctcggcgtccgaggaggcatcatagtgaactgcgtcggcgcaggcggaggcgacagctcgccgtcgctgggcgttgacccgctggcgcgtgaaaatgtcggccgcggcggaggggagacgaagcgctcgacggcaagcggcgtccgtcttgcgctagtggacgaggacgagccagcggtgatggtccttgcccggcgaagaggtgtcacctggccgaggttcgagtcgagacggcggggcgaagacggcccgaagctagggactggcctagtcgaagccgttccgagcgagtagagggccgacaaggcgtacagctcagagggcgaggtgaggacgaggacgttggcgtgagccgtctcgacgtgatgctggaggacagagagcgcgtctgcgatccttcgccggagcggcagcagagtcgtcacgtccggggcgggtctgtgtggcgagcgcgagtccaagcgatcagccctccgtctgcaggcggtgaggaggaagaccgaagcgcacctttcgcgctcggctgtccagacgcgggcaagactagagttgcacgcgcggtcaaaggcctcagcttcaccgaccagccgctcgatagcgctgacggcctcggctggtggcggaggaacgatgctgccgatgctggcaagacgtttccttcgcctggccggcagctcctcgggcggctggccgacgacaggttgccgtcggcggacgatcgggaggagatagaacgagcccccgaggacgagaccggtcgttgcgacggtcagccaggcgggccaagcgaggcgagggctagcgagtagtaggattaaaataacggccgcgagcacgaagacgatcaggctggccgcctgcagttgccgtcgactcgacgctccgtcagtcaatggtgcgctgtctcgcagggagggcgagcgggtgccggctgcctcggagctcgtccggtcggcgccgtccgtggaagcggcctcctgcacgagagctgatttcggcggccgctctgttgcgcgagggagcgatgcctcgagcagcgaagacgagacgagcagaaagcggtagtcggcccgcaccgggctggcggcggttggcccggttggagttgggccttcgcgagcgtcggccgagagtgacaggagcgtgacctgcgggagcgaggcggaaggagcagggtcagctggcggctcaccggcagctgatgagttgagggtgctcacgagctcagccggcaggaggctgaggcatagctcggcccaccacacgccgcggccggtcttcgccgctgtcagagctggcgatggtgagcgatgggctcgtttgaaggcgcccggcaagccgtcgagcgcaggcgacgcagacgacgacgacagcttcgacgtcgccgtcgaggtctcgtcaaccgcagggactgcctcctcaacgatgtcgagctctgatggaaaagagggcggtcgcgtcaatctcggaggcgggagcagcgcgttgggcaagcaggcaggcaggcaggcaggcaggaagcagctgacctcggaggtaggcgtcgagcggctcgccagcgtacgacaggccgtccataaaggaagcgagcgtccggctgagggcgagatggtgtgtgtcggacgggagagacggcaagggcggaagctgaagggagcgtgggcatgagctggctgtcgggtcgtcgtctcggccagctgggctgttttggcatgggcccgtcggaatcgcgcgcgggggctttgcggcgaggcgaagatcgggcgcgtcgcgacgcctgctgcgagctggctggctgccttgtgatgaagcgatgaacggacaatggggctcgcggcgcaggacaaaaaggcaacagcaggctcgctcgctcgcagaagccggatgctggcgtcgtctgcccagcaggtgatcaaggggagcaggcagtaaccttgtcctagggtctggcccactgatgactgtgcccatcggagggacgagcgtcgaaactgagacggccctaagggcccgatgggcatggccgacagcgagcagcaagcagcaagcagcagcagggagagaggacaacgcttccagccacgagcggcagcagcgcatccctgtccaagagcgacaacttcttcatacaagccagcaagcacctcgtccgacacctcctccagctcagccctcgccttgccacctcgcccgcagcagcgccgcccaccggcgacccaagccggcgctaggagtccccgacctttattccattccccgacccacctcggaaggtcggccctctcgctcgtccacgcacggcgtcagacgctcgcttgtggccctcctcctcatcacctccttctttctccctccgatctcccttacgccctcaagctcgtctctggtcgtcgcgcaactcaagctcgacctccgcaaccccccgcgcgtctcgaaaggctccggcagctcccttagaccctccgagctctcggtagccctcccgccctcggtcagcaagcagtccagtcgagaccgtctcctccagaccatcaacgccttcgttccgtgagtcctttctcttttcgtagtaaaagcgcgtccggcagcagagatcgcatggtcgcaggcgtcgtcgtccggggccgcggccggccgaccgacgacccgcgctgaaacgcccagaggccaagggccgagggcgagacggaaagggcagcgtcagcatggccacgcacgcacaaacgctcgccgcattcttccgacgccgtcgctttgcccgtctgcccagctcgagaggccttgcgactcgacttgtcgaagtgcagcgtcgctgacgcccctgccctgtcggttctcaatcttccgccgcctcctccacccggcgcgagaccttagctcctcttccggacgtcctacgagactcctcctcctcgtccgaccggcctcagcacgtcgcctcaaagaacgggccgcctgcctgctccccgacctcgcttgaagacgttcaggtcggacgctccctagtccggtcgcctgcctcgctcacaggctagcccgctcctgcgcaacggccgtctcgttctcgacttgagctcaacacttcctctctcaaactccggtcggctcacggccccctccagcccgccccgctcgacctacggccacctctttctcgagcgagagccctcgattcctgccggcgactcccgtcttttcctctccgacgtcccgctcgcatgacggacgtcgtgcacccgcagcagcacgtcgctggctcgagcggcggcctcggccaccaccacaacggcagcagtagcagccatcacctgccgtacccgcaccatcagcagcagcagcatggctaccagtacccgaacgggagcagcccgggtctctcaccaggcctagcctcggcgacagcctcgtcgtcgtcgctctcgctcccggcgtcggggtcggcagcggccggcggctcccgtttacacaacccgtacggcgtcctgccacctggtgcgttccgtccagcgtcaggggagggatctgtcgagcagacatgaggcgaggcagggcgttcctctggcagctcgaggtcgcagaggtctcacccggctgccgcctgcgctgtcgtcgcacgttgcggggattgagcgctgagcagactcttccccattccttgcgctcaaacagatgcgccgcggtcttacacgccagtcaagctcgtcggcgatggctcgttcggaaccgtctggctgtgcgactggcactcgcctctccccgccgggacgacgctgagtccgatgcagtgcggggccggtgcacggccagagtgggccggcaagcggctcgtcgccgtcaagcgcatgaagcgcgtgtgggaacgtggctgggaggaggctggcaagctgaaggagctcgaagtccgtctgcgcctttctcgagctgcgcgcatacaggcgtttcgattgctgaccatcgtcgacgaatccccccccccagtcgctccgcaaaatctcgtcgcacccaaacatcatcccgctctacgacgccttcctccagccgagcaaggagctctactttgtctttgagtgcatggagggcaacctctaccagctcactaagtcgcgcaagggccggccgatggcgggcggcctcgtcgcttccatctttcaccagacgctgtcgggcctcgcccacattcacgactcgggctactttcatcgcgacatgaagcccgaaaatctgctggtgacgacgatcggcctccaggactacacacctgtccgcgatgggccggtcccgcccgggacgcggctcgagaccgacgtcgtcgtcatcctcaagattgccgactttggcctcgcgatcgagattaccgcccagcccccatttgaagagtacgtctcgacgcgctggtaccgggcgcccgaggtcttgctgcgctcgcgcgactatggcccggccgtcgacatctgggcgatggggaccatcatggccgaggtcatcaacctcaagccaatctttccgggtcagagcgaggtcgaccaggtctaccggatctgcgccgtcctcggcaacccgagccgcgagtatggcctcgacgagcgaggcaagctccgcggcggcggcgactgggatcgcggcattaagctcgcgtataacgtcggctttggcttcccaaaagtgcgtcgcgcgaagcggagcctcgcttgggtcgaccttgctgacctcatcccgtctcgaacgcctgcttggacgcacgccagatgtcgcctgtcgtcttttcctcgctcttcgacaccctgatcccgcgtacactcatcgattgcatctccgagtgcctccgctacaacccccggcaccgcatcacgccgcgcaacctcttgaaccacacctactttcgcgagacggtccccaagctccaggcggcgccctacatccctgcgatgcccgaggcgccctcgcggccgtcgatcccggcccaggcgctaacggcgccctacctgccttcctcggcctcgtcgccgctgacgagtccgccgcccccgcccgactcgatgacgagcagcgtccagaatgtgccaaaccgcgacctcccgccctcacactctgtgccagggccgacgccgggctttaagctcgtcgacccaaacgccagtcggacgctgccgccgctccagtcggcgcaccagggatcaggtggccgcgtgccattcttcccgcagtaccgcgacgtgtcgtcacccgtcatgccgccgacgccgtcgtcggcctcatcctactcgaatgcccaggccggccagctccatcggaccactggcactggctacgacggacaccaccactcgtcgccgggcgtcgagcactcgccgagtccgaaccttctcggcagccagcgtcggacgacgggtgcgtcggccctcgtcgaccagctcaagcggctcgatctgccggccgctgagctgtcgagctacggtcggcgggcaccgccgtcggcggtcaatcgcgcagccggccaggcgccgccgcgctggcagggcacgccaggcgtcgccccacagcagcatcagcagcagcagcagtcgccatacgacggcgcaggtggttttaaccggactttgccgccaccgcaccagtcgtcggcttcgctcgcctcgtccggccacggtagctcgtcctcgcaccgtgtcacgcccgctggcatggtctcgccgagccagccgtcactccacgttcggtctccgtacgacgacgaagtctcgatgccgccgccagcaacgatcgaccgggagccggtccgccgcctggacgtcgctgccgccaatgccgaggtcgaggccgcccggaaggctgcgctcgctcagcccacgaagaagaagaagtgggggctctcttctgtctttggcagcaacaacgactcaaaggccgaccactcgctcgtgtcggttgccgaagagtcgtcacgatcgtcggtcccgctcaaacggagccagtcgatctcggaccgggccgacagcaacacgtcacttacgagcggcgagatgcaccaccaccacgccgatccgaagctcgcggccaaagaggtcaagaagcaggccaaggcgcttgagctggccaagcgcgaggcggccgagaaggcctcgcgcgagcgcgcccgggctgtcatgatgaagcgcgagcggatggtcgaggcgacggccgagcactacaagtcgaaggccggcggcggccagctggcggtcggcagcaagcccgtcttggcaaactacctcatcccttcgtcatcgtcgtcgctcggcctccagtcgccgtcgaccgcgtcgctcaactctcgggcaccggcaccacctccggccaggtcgtcggctgcttcacaacgactgccgcccagcatggccgctttggccggccaccagcggcacaagtcgcgaaggcgcgacggcgacgacgaccactcgacctcgtcgctcgacacaaattcgtttcgctcaccgtcggtggcaacctttcactcggtcgactcggacccaggcccgagtcggctcgcccgacagtactcgtcctcggtcggcgtcgacccggcgctcgggatccggcgctcgggctaccagactaactcgcaagggtccaactctagcccacagctctattcgctcccccagggctcgcacggctcaatcgaaaatcagttgtcgcgcgacttttcgacccatgcccggcttgcaaacagttccggcggctcatactcgtcgctcgcctacagcaacaatccttacggccgcggcggctccgaggtgagcagcctccagctgccaagcctggcaagccaaggcctgccggctccagatcgatcgggttacgtcaacccgatgttccacgtcgtgcgtccccacccctccttctttcgcagccccgacgagccgagcggtcgctgacgactctttctcgtgcttccctctcagcgcgacccgaccaacggcgacggccagcacgcgacaactctcccgcccttttcgcagctggcgtccgtcgccgacggccgccatcagcagcgaccaccccgttgagtggcgccctcggctatcgtccctgcgctatctgccatggcaccttcgttattctccaggcgcgacgccatctaagattggcagacgcttttactgaaaggcagcggcttcctgttcgagcgagaggtagtaggctggacatacacaaggatagacgtgatcagcgctgaatgtccagaacagacataggccggagacgcaccctcggccgtctcgatgcagcgaacgttggctttgagcttgttgagcgtctcgacatactcgtcgagctcgaccgagtcgtggacgatgccgccgccggcctggaggtaggcgacgccagccttgaacgtcatcgtccggatcgcgatgcacgtgtcgagcgagtcggcatcaaagtcgaagcggccgacggcgccggcatagacgccccggcgctcgccctcgaggccgccgacgagctcgatcgctttgatcttgggcgcgcccgaaacggttccggcagggaagatggcccggaaggcgtcgaagcgcgtcttgtcctctcggagctggccgctgatctgcgacgtcaggtggatgacgtgcgagaacttttcgacgttcatcagctcgtcgacctggaccgtcttgggctggcagacccggttgacgtcgttccgggcgaggtcgacgagcataatgtgctcggcccgatccttctctgacgccaggaggccggcgccgagcgcagcgtcctctgcaagtcgggtcaacatcaaaagagtcagtcacagaagtgaggatcgtagtccaacacggggcacttaccctcggccgtcttgccacgcttgacggtgccggcgatcgcgtggttgaagaccttgcggtcttcgaccttgcagagcgtctcggggctcgcgccgacgagctggacgtcgccaaagtcgaggtagaacatgtaggggctcgggttgagcgaccgaagctggcggtaggcgttgaaagggtggagggtcgttggccgggccagccgctgcgaggggacggcctggataatgtcgcccttgacaatgtgctccttgagcttggtcacaaagcgctcgtagccggcctgaccaacgttcgacgtcgccacctggtctttcaggatgggcgcctgggccgggagcgggatccccggggcttggaccgtctttgcgagcgcgcggagcgtcgccgccgagcgttcgtacagcgcaggaatctcggccacgtcggccgtcgacgggaggaagacgtgcgagacgagccggagcgtctggaacaggtggtcaaagacgatgagcgtctcggcaaacataaagatggactcgggcagctcgaaaggcgacgtgagcggccgggccgtccgcggctcgaagtggtggatgcagtcgtacgtgaccatgccgatcgcgccgcctgtcggtcaaagagacagagcctatgtcgtcagcgcagctcagtcgtcgacgaggctgggtgcgcaccggtaaaggtcgggatctctgggaccttgatgtacttgtaggctgcgagctcctgctcgagccgggcgagcgggtcaccctgcacctcgtaacccggtcccgagcgcagcgtcttggtcgggtctgccaggattactcgagtcagccgctgcaccttggcctgtgacggcatccgtcgcctcagtaaaggcgtaagggtcaagcgacgtactggcgccgaggaagctgtagcgcgagacattttcgccgccggtgatgctctcgagcaggaacgagttggttgcgccctggctcacgcgtaagtatgcaatcaccggcgtcacaaggtcggccggcagcgtcaagaagattggcacgacgttgcccttggcccggtcggccgtcaggagcgtggtgacgctctcgagcgagggcgagggcgtcaggtgctggaagcaaaaggtaagtttacattagttcgatagggctgaatgaagcgcggctggctgttgctggcagagctgtccggttcgaggcaaagcgtgagcgaggcagtcagacgtacagccggataggacgtgcccgagggcatcgaggtcgaggcagccatcagtcgcggcgggatggtgagggtcttccggggaggatcgagcgaaggccggagtattgaaggagacgcgaggtctgaggatgccgtactgtcgaccagagattacaaggcgagacgggcgatggcgggcttgatggctgtcgagagggaagcagcaaggagtcagggcagggagcttcggcaacggccgtgctcctccgtccgaactccgtcgaagccgtctcgtctcggtgcaagctcagccctcttctctgaccctcaccctcagccccgcctccgaccttcctgcctctcaggtgcgcgagctcgacgagccagcagtccctctatcgctttgtgtcttggtatcctgaccttctgccgcttcccgcgccagacccgacttgccgccgcgatgcccattgaaacgctctacatctcccggttcgtctcctggctcctttgaacgccctgagcttcgcagctgactccgaaacgccctcgccaatacttgcaggcacggattccgtcaaaattggctcacgccggacgtctggcagaagtttactccgacggcgcgcgacccacctctggctgcgtacggcgtgcgttctaacgcggctactgcctggagccttcagcccgaggcgcgccattgaggtcgagtcactgaaacttcatactgacctgctgctctctcttctgccgacaggtcgagcaggctgagcggatcggcaagtggttctctagcccgccggacggcctcgtgagtagcaggccgcttgagctcttgcacggtgacgtcgcctgggagagctgaccctctcttacccttccctccgcgcggcctcagccgaaaccagagctcgtcttttcgtctgccttctaccggtgcatccagacgagcgtcccgctcgctttggcgctcaagcagacactcaagctcgagcacggcctcggcgagtggtactcgctgacgccggccaacacggccgctcttcacccccgacccggcactcctacggcgctcgcgcccctcttccccgacggcgtcctcgacctcgagtacgagccgacctactacccctcgcgcaagggcgagacgctccaggacctgcacgaccgggccgagctctttctcgccgccttcctcgcccggatcgaggccgagcacccgcatgtccggaccgtcatgctctttggccacgccgcgagtgtcatcgccctcggccgggcgctgacgggcgaaaagacgctcgaggtcgttgccggctgcgggagcgtcaccatgtacggccggaaagcgggcgacgagggcggcggcatcggcggctgggacgtcaagcggatgggcatggtcgaccacctcgagaagggcgtcgagcggaactggagcgtgcgtcctccgtgtgactctaaccctatggaggggccgtctgtctgacccacttcaggccccgctcgcccacagtttgccgacgtcgttctcaatgccgagggcgatatcgtcgccgacccgggagagcccggctcagaaggccagcgcaacgagccgtgcggtctcgcgcccggcatggagcgctacctgcccgcctcggcccggagactcctcgcgccaaagcagacgagcgcactctagacggattatagccggaagcgtctatcgctcgcgccttgtgctccttcctgtacctcttagaaaactgtagcccgagagagacccaaccgtgatatccgatcccctttcgacctgtctagaggcagcgtctctcatctatcagggcctgcgcgtcgcatgcagcgtggcgggggctgcactcgcctacttgcgctgcatcagctgctccttctgggcgttggaggctgagggaggggaggcgacgatgctagtcagccactgagcgctcagcccacgggagctacacgggcgcacccttgagggcagcaatcttctcgtccttagttgcgttgtagtcgacggtgagctgcaaggggatatgagcagcgcatcagccctgggaacgttcaatgcagccaagaaagagcgcacagcgttgtacgggttgtccttgtgcttcttgaacgactggaagagcttctcgcggtactggtctcgccgcaggccagggtgctaagataggagaagcgatcgtcagcgacggtggccgcacagaggaagcgcttgagacttgctacgtacgtccttgcggatgacgggcatctcctcctcgatgtacttctcgagcgccgccttgaagcgccgctctgggtgcgcctcgatgcccgccgcccgctggccaaccgatgctttgtcggctgcgattgcaacaaggatcagcatgcgagccgtcaaggggggcacgatgagacagaggcttgactgacacttctggttggcgatttcgagcgcctcaagcctggaaaacgaaagcgagcaagacagtcgggcgtcagtaagcccctacggtagaatcgggtggccggcaggagagaagacgcacatgctgtcgataccggtcgcgtagagctcctatgggtaaggtaagagcagacataaagtgacgagtcaatcaagagagtcgaacgggcgcggcgaagagacgccgacagcgcacctcgaccgggtcgtccgagttgacctcgatcgactggtgcatcgggatcgagccaaggcctccgccagcggcgagcgctcccggaccagcaggcttctcgaccggcttcttgtccttcttcggcgcagccttgaccttcggcttcgacggcagcgagctctcctcctgcgaaacgcgcgcaggcacgttagctcggctggatgccagagagcttaccgcgacccgcagagcagagtgcgcacctcggccagcagacgggcaagctcggccttccgggcgagctcagcctgacgcttttcttccttcgacgtgtccttaacctgcacggagaaggggggggggagacgagaagcatatcagctggaggtgcgttggcgcggagggcgcatgcgtacgcaccttcgcaccgtccttccaggcgtcggcctcgttcttctcggcctcctgcttcttctgtccggccttgacctgcggggaaggaggaaatgaggctcgcatgtcagcaggctgaaggcccgcctgggcaaggaccagcgaaggccgtgaccgaccttctcgttctcctccttgacggccttgccgcccttgcctatcgtcatcgagagccgatcaaaaggtgccggaagcgccaatcagtcacaagcgccaacggggagacacaatctctcggcgtgcgagctcagaacaacaagtgctccgagaggccagccggcgggccttgctgctcgagagcctcgtcatccgagctcgactcctcgccccgaccactggacgtacctcctcccttggccatggctgtgggtttgcttcttaaaaatttgtgtgcttgagcgaatacttgacgtcgagttgggagtgggcttggtctgcgaggctgagggctgaggaagaaagagcaggagggcagatggttgtcgggcgtcgacttgaagctcgttgacctcgcttggccgagcggctcttgcgcggacgcttcggccgaacatgcatgcgtacgtgtccaggaagcctccctcgacgcctggcggcaagccttcttcatacgagtcgaagggtactgttgcctgcttatgtcttcattcgacatgggaagcgtctcgcctgtcactctgcccgatcccattccgccttggatcaagcgacatcttttttgcgcactggcctcgacgtccgacgccagcgaagccgacctgccagccacgcttggaagtcgtacaatagtcatgaaggatcgtcagggaggagcgcgttgggttcccgggccaaggtaggtctactgtgcgaggctagagaagaacgaggtctccggggcctaagttaaagcgacgcaatacggggtggtcagcaccgtagacaatcgagggctggcgtgctgtgacagtcaagctcaagagaagcgacgcacgggattgcgcgactcgaaggcgagccagtcggccgcaccgcgcgggataatgcccatctggttgcatttccagaggccgagcgcgagcgtgaggcactggcaaaggacaaagacaatctgcgggatcatcagctcggccggctcttgcgacgtcggggccggctggaacggctggaaggctgatggaggccagcgagagggaacatgaggccgctcgtcagcgcttgtcgggcagggcaacgggcatcgaaggacaacgcactgcgcttgatgttagacaccgccttgattgggtttgagaggagcatgaagatggtacccatagagaagatttgaacgcctgtagagaagcaacacgaggcagagagaggtgcgatcggagcgactgtcagctcgatccgccgtctcgaccacgcacacacgcggacggacctgaaccagacatgtagagcatgaacgcattcataggcaagctctatggcaaagcgtgtcgccgcatgtcagtcggcgagtgagccaaggggaggctcagcgtcaggcatgacgaaccttggcagggctgatggccatctcccaggcccgcttgacgcgaatcgacttcggcgcgatgccgagagcggccagcgggtcgtccagggggttctccggtgcctggatggcgacggccgaggcaggattctgcatgcccgggaaattcagggagcaagcgtgtgaagcaggaacggagggacggaggcgagggcgcggtcagctcgggacgctcggctcttgatcctcaatgccgcggtctgcggacagagagctactgctgaccttggacgacttgaaggcgacgagcttctggccgactccaggcgggttcgggacggcagcggaggccctaggacgttcaggcaaggcggcgacgatggaagccagggagagcagccggtcagctggaggcgtcgcgacgagtggcccgccggcagggtccggcggcagagcgaactgacttgacaggcgtcgaggtcgacttccacgggaggctcatgatgagggagagagcttgatcctgagagatctagcggggcgaagatgacggtcggaggcaaggcaggggacgacgggctgaaggcgagagcgttcgcggcagccaagcggcagcgtgtcttcgtcttcccgcggcgcactcgatgtgctgtactctgaacttgcgcgctcatttcgtacattgaatgagaaggtcatgagagactctagtgagcaaagggccggtactacacgcgagagcagatccaaaagatccggtttttgagagtgagggggcggcgatatgcgagggaggaggcaactagctaaaggtgtgtttgaaggtgagagaagggtcgggtcgtgagggtagacgtgaagagagggggcacggcgagagaagcaaagataggcacaaagcccgtgaggaaggcagcgggagcgacagagggccgactagaggaagcgaccgagaccggcggcctgaatcttgctgccgacgtcgccgacggtcgtcaggtgccggacgagggcgatgagctgctcgcgcgtctcggcgccaatctcctcctcgcggccgtcctcgaggacgtagacaaagacggcgaggagccggtccatgtgcgagaggaggaccggcatgacctttgcgttcgaggccgagacctggaagaggtggaagatgcagcggaagacgacgcggttctcgatgaagtcgttcttgagcggaagagcctcgagcaggaccggcaggacctggtcgagcgggacgacgtcgcagtccttgaggatgatgcgggcaacagcaccagcagcgttgtcgcgagcgttgccaaaggcggccgactcggcgacctgctcgggcgtacaaaggaagagcggccggaggaccgtgaggagccggacgacgtcgtcgaaaccgagctgagcgtccatgttctcgacaaggacaccggcagcgaaggccgcgttcgaccggacctcggcctccgagtcggacaggccggcgtagatgagctcaaagagcggctgaagggtcatgtcgggagatgtcagcagggcgtcggatgaagggacgagcgacggagagagaagacgcacctggacataggcggtgaccgagcccttgaggccggtgatgatctcaccgagcgcaccgcaggccatcgaccggtcagagaccgaccgcttgggcgactgtgtgacacggacggcgtgtcagcaaaagcccgctatggcggcggcaggcgcgggtgcgacgtacgtagtacttgcggatcagcggcaggaatttgccgaaggggccggcaaagtcggcgccgaggacgctcgcgagcgcgccgaccaggtccgaggcgttcgagatgagggccgactcgtactcggaggtgtcgccctcctcgttgccctcgtcctcgtcctcgtccgggtcctgctggcagagcgccttgccctcgagaatctcggccgcgtaggcggcaattttctcaaagtggccctcggcgagcgcggggccgcacttgttgagcgactcggcgagctcgctggcggccataatgacgacagtgctggcagggttgagcgggggaggaggatgtcagtgaaagggtcgcaggtgaagaaggttgggcacaatgagagtcgatggatggtgtggagggtcagatacgaaaaggtaatcggttgaggtcacgagcagttcctaagctgcttcgtagtgagctgagttgatatgatcatcactcggggaggaggaggggatgggagggaagtgcggcggcagaggggcaagactgaccggtcatcctcggcgtcccacatcgagaagatggcgggcaggacgacgtcgacgagctgcttgacgttggcgtggagaggcgtaacgatcttcatgccaggggtccactcggccgcctcggagagctcgtagaaggtgttgatgaacttgaagagggacgagagggccgacttgcggatgccctcgtagtagtggtcgagcagggcgacgagtaccttgaccgaccgctcgacgtagggcaggaacgtctggccgcaggcggcaaagatgtcgccgatcgcgtcggccgcaacctctttctcaatcgcgatgccagagttgacgccgccaaagagcttctcgagctcgtcagcgtcgtcctcgacgtcgaggaactcctcgtcatcgtcgtcggcgacagtcgcctgcttgccgcccttggaggcggtcgcagcctccgactggaacgactcgagcgccgaggcaacctgctcgttgatgtcgccgttctccgtcaggaactcgtccgtctcggattgctcgcacgacgtgatgagggcctccatgacgttgggcaggtaggccgagaactcgtcgccaaagaccttggccatcgtcgcgaaaaaaatgaacgagcactcgcggagccgggcgttgtcgaggatgaggccctcgaacgcgagcttgacgcagggctggaagtacggccggaagacgtccttgccgacggcctcggcgatcgtgccgagcgtgtcggtcgcaataccccgaaggtcggtctcctcgccatccgtcttgagcgtaaggaagacctgcatgcgcgagatgctcgcctcaaagtaggggatgaagccggcctgggcggcgtgagcggccgagccgatcgcgccagtaacggttgcccggacaggcagcggcgcgctctcgagcaggacgagcaggcgctccatcagaagcggcaggtaggtcgtgatgctgtcgccgaggatctcgaggtacgagtcgagtgcggcgcacgccggcttctgggccatcgggtccgagatgtggttgaagaggacagggacgatcgactcgtgccggatcgcgcactcctcgggcagccactcgcagaggcagccaagagcgatgcaggcagccttcttgaccatcggctcctggtcctggaggccagcctcaacgatcggccaaagctggttgacgtgcggccggatgaactcagagcagccctcgacggtgacgccaagcgccatgagggccgccttgcgcgccgacgggtcggccgaggccatgtcggcctggatgtggcgcgagagcggcgggaagatctgcgagggcgggagcgtctgcgagaggacgtcaagcacgcggaatgcgagccgcgacggcgagtcctcgtcggcgtcctccgggtcctcctcgcggccgatcggcaggagccggccgaggatagcctcgccgaggttgagctgctggaccttctttgccttgtagcggatcgtccagaggagggcgttgagcgcgagcacgcggacctcgtcgtcgtagcccgtgttctcgccggcgccgaggaagaagttgacgaggtcgccgatcgacttggagatgaggggcgtctcgagaatgagaagcgtctcaaagacgtcaaagccctggcgggcgccctcctcgttgccggcctccatcacctggtgcaggacgccgaccatgcccgggatcaagccctggaacgtcgtaatgtcgctcttgtcgtcaatctcgatgtactcggcgaccttgccgagcgccctggagagcgagcgcggagggaagagttcagtgccaggccattcgggggggacagccatcaaagggggcctcaccggagggcggtgatccggacctcgagcgactcagggtcattcaggccctggccgagcgtcgcaaacatcttgggaagctccgactggaggcactctgcgaccgtgtcgagcagagcaaagaggataaagtagccgacggcccggtgggcctggttgggcgcgacggcaagctggtagaggaacggcaggagctcaggccactggggcgggacgacctcgagctcaatcgaggcgatggccgagatgacgcgcgagcacgagtgacggacgagcgagctggaaaagggtagagacttcggtgtcagcgaggccgccgggtcgagacgagaacaaagacggacgcacctctcctccttgaggacaatctcgagcgagttggccttgatttgggaccgcatctcgaccgggacggcctgccacatcttgccatccttcgagatgacgcgcttccggagctcgacagcggcgagttgccggacctgcagaggaagaagggcgtcagtccagcctctgcgcgcacgttgcgccctgtcgccgcaaagagctctggagggacactcacggccgtgttgggcgaggtcgcaaggatctcgtagagggccgggatgcactcgggcgacttgtagtaggtcgtgttgagcgccgtcgtcgcctgggtcaaagaggacagtccgtgcgaggcgggtcagctcacggctcggagaggagcagcttctggccatgggagaggctcgaggcgaccgacctgctggatgatggccgtgtccggggccgtcgtctgctcgagcaggacgtgcagttgctgggcgtaggtctaatagagcacgaaaggccgtcaggtcagacttgcctcaggtgcaatcgtgggctgaagggcggcctgcgggtcgaggcacaacagtcgccaccaggcgagagcagccggcggcgacctggaatctgttgaaagtgtcaagactggacgtacggccatggctgctagttcttcccacgtggtagaaggggaagaaggaggaggggggggggtatacagggaggaaggaaggaggtgactttcgtctcgaggagcgggccgcccgcacgagccttcgccagcagagagagcgcaagccgttcgggagcgaaatccacattttgcccggctcgcatctgctgttttgaccgaggatcgtcgccctggctcggccagtattgaccaggccagcgagcaggactcgagcagacaggtctcgcaggcaagcctccatcgaccgagggaagctgacacagacggctgatcgtggcgtcgtcgccgcgcgggcgtcggcgttcgctctggccgcccggccggccttcatcgcgcgcccgctctggcgagtctcggaggtcgaccgccagcggcctcacgcaggacgatccagggccggcctcagcggcagacgaggcgggagggtgggcaatgccgtacgccgtcgtcggtcggtaccaggcgaagccgacgtcagcagcatggggcacgatgagcttgctctcaaaggcagacgagaaggaaggggggagggaggggcggaaggctagtaggagcgcgggcctggcgccggctcgcgatcccagtacttgacgtactcgggcccgagctgatcgaggctcgagacgccgaggttgcgcatcgttgtcgcaatctcctcgttcatggctgcccaagcgagcgaatcagtctcggccggtcgtgatgcaccaagcctgcgagagactcactctggatgaccttctcggccccattctgaccgtaggttgcgttgccgtaaaggaacgacctgccgaggccgaccgccttggctccgaggcagagggctgcaacacagaacaagcgggttagcgtcggtctcgaattgatggaccggtagcagggggaactgacccttgacgacgtcggtacctcaacggacgccgccgttgatccaggcctcgacctgcgagagcagctccggctttgtctgctgcagctcgtagaggacgtcgatcggcggcggcgaaaaaatgagcgaccggccgccgtgggtcgagaggatgaccgcctcggcgccgtatctgacggcgagctcgacgtctgcgaccgttcggaggcccttgacgatgatcaggagcttcgtcaagctcttgagccaggtgacgtcgtcccacgagaggtcgggatcctggtagccgatgatcgcctgtggcgacgcaggagagcgacgaactcgtggatggatgccgggtcgagaatgccgacgaggctcaagggaggcagcgttcgctcaatcacgcctttcggatggagcggggcgaacaccttcctgttggggttcaagagcgcttgagacgtcagtcctcaaacgagcacagatttatctacaagccaggggacaaacgtcgcgtccttcccagcaccctgtgtcaggatcgcgttcgccccgccgggatgctccgcgaggaaggcagtgacgtcccagacgcgaagctcgcccgagccctcgtccttaatgacgacccagcagctctcggccgaggcgtgctgccggacctcggaggctgagatgagccggtgcgaggacggctgtgacagaggctcagtgctggtctgcgggccgggcgagtcgagggcgatagggctgccggctgcgagcaacagctggtagcttgcgaggctcgcgagtgcgacggccgagagctgggcgaagggggaccagctcgcaaaggcgtcaggccctgacgagagtgaggagcagcgagcctgttgagggacccttgctcacgctgctgatgagccttgccttcgttcaacctccagcaagccggcttccggccgtgaaggctctgctgagtcgggcgacgaagggaggccggccgatggcgcggccggtccctgccagcagcccgcccgtcgccggcgcggtcttgcgcgcgatcagctggagagccggacgggacgggcgcattcctcttaaggcgaggcttcgcttgcgagctgagggtagatggtggttcggggacgaaggcggtcggcgacgaaaggaagggcgtcgtccgacaggtcgaccgaccggccaacgccgagccgagcgcagcagcaccgacgattcgcctcccttctctcccggcccgcgcactggtcgccctgcctcgaacaaggccctcggccggagtgcatcgggcgaagggtcgtacgacgatgagcgagtaaaaaagagcttcggctgagaagggacttgctctggcggctgctcgacacccggaacaaagggagagcgttgtcgccgcggagggaagggggtcatagcatcgatctacccggccgccttcgacgccgaaagctctcatccgtccaggcctagttgtactgcgcatactgcgtcatcgatgagagcctctggcccgccggatcaccttctcgacctcgtccaaaaagtccttctcggtcgcgaccttgcgccgggcccggatcgcaaacatgccggcctcggtcgcgaccgaccgcagctcggcgccggtcgcgttcgggcagagccgggcgatcagctcgaaccggatgttcttctcggccgacattctgccgggcgagcgagcagagtgcggtcagccgacagccaagggagaccgagagagggggggggaaaggaggaggacgcacgaccgagcgtgaattttgagaatgtgcgcccggccctcgttgtcgggcagcgagaactcgactcgccggtcgagccggccgggccgcaggagcgctggattgagcgtgtctggcctgtgtccgaggaggagggttgtcagtggtggcccgacaagagcgcaacaacccggcaagaaagaaggccccaccggttcgtcgctatcaggatcttgatgttgccccggtccccggtcgtatgcgccggcaggcgtcccaggatcctcggatgtacccggcgacggagagtcaagaggagcggtcttcatcttttacgccgatgctcacgtgaagacgccctcaacggcggtcggcctccggtggcgcggactcgagcgctcgccctgcctcggcgacgagacgaggcgcgccgcttgggttcccgctccattcgacgatgcgctgaagcggagtagcgccggagggggcatctcgagcgaggcgatcgttgccgtggtcgttggccgtttggccggcgacgggctggcggcctcttgacgtgcgctgtcagccccgaccgaggcttcggtcgactctgcgacgctctcgtcgtcgttgacatcggcttcctgaccaccagcgccagtgctgagcgcagatggcgaggaggtggccgttgaccgacaggccagcgcgtcctcgacggccgtctcagacgacgtcggtgccgaagtcggcgcggccttagtctttgacgccctcgtctcgaccgttcgaggggcggccggtttccggctattggtaaccgttgtcgccgtcgtggaggccgagcaaaggctcaggctgctgctcgcgcttcgtcgccgcttcagcgcagcagcgccagaagcgccagtacttaatgctgatgcgggcagcaacgccgagctcgaggcaccgacagacggcgagcctgagagtcgggcgacggggatgttctccttggcgatgtcctcttcgtcgtcgccagcctccgccacgctgccgtccccagcgactgagccgccggtccgcgccgtcgaggtcgacccagccgacaaccgacgagtctgtcgaggctcacgagccgcgccattcgccgctggtgactgaaccgctcgccggcgcaaggccgtcagaatggctgctgacggacgatccgagtagacctcgaacccacagccggccgtgccggcctccacccctcctgcgccgctgcagttgctgccgctcgggccagcctgcgccaacggctgctgctgctggcgaccgatgttcgtctgattcgaggaaatggccgatgctgggctcagcgcgtacgagaagaacgaggggtcgatcgaccggccggggctgctgctcgagccgctgccgttcctgccaggcaggctaccggtctcgcgtgagcgaagcgagcggggcgactggtgagccgctgagctggagaccagccctgagctgccgacagcagctgccttggcccgccggaggagcggcggcgacgagcggtggttgcgagcaggcgacgacgtcggcggctggacggtcgtcctcggtggcgccggagcgggcgggctgcctcggagccggctgccagcacttgaagacgccatggcgcccgcgtgcgagctgttcgaggaggtcgtggatacgcaggaggacgaccgggcgagctgatgaggaaacgacagcggatgcgggctggatgcgcccggccgggagagcgtcagagggaggtgtcagttgccagggctgaaggacggcgcttgagaccgacattcgcggaggacacgcaccttctgccgtcgacgagacctctccgcaggctgcttgatcctcctgcgctgctgctgctgctgctgacgaccctagccgaggaacggctggcctggatggctgaggctgagggtgacgcgccggcgggagctgacgtcgatggcggcccggcggcggtgctcgcgtcagagggaggcttctgccggccgtacttgacgagcgtcggcggcggtggcgggctgggctcgtgcaggacggcgagcgggacccgtcgtgaggatcgcgtcgtcggcgccatcgtgggctgtactggatgggtcggttgttggctgaggtctctcccgaacgtcccttgctggccgacatcgtccctcgatgcgggtcggtaggcttcccctcgatgcagctcagcaggcttcgtcgtcttcggcaaggcgacttgaatgaagccggctgccgacgacgcaccattgatctcgcccgacggcgacccgacagtactctgaccagcacgctcggcagacccgcattcaaggaacgtagaatcatccacatatggccgacgtcgctgcttccgccctcggccgcctgctgcccgcccagcgcgccctcctccggggcaaggtcgtctggctgagcggcgccgcctccggcatcggtcgctcactcgccctcacactcgctctctccgggtgagtgcgccctgcctgctgttcgctctacggttgcgggccgaaagctgtgccgctagaagaagggttgagcgtggcgagcgcacggctgccagcgctgacgacgacggcccttccttccgatcgacatttaggtgcaagctcgtcctcggcgatctgaacgagcgcgggcttgccgaactcgcggccgaggtagccactctgggcaggtacgctactccttctgcgtctgagaggggtctgctcagccgagatcggtagtgctgcagcccgggctgggtcggaagatcgcactgagcgcgcgcagtcgtccggcgcaccccgcaccagctgacgtccgcctgctatgtctgcctcatccctcgcgttcagcgaggccgtctacgcccggtgtgatgtcacctcgtgggagtcgcagcttgccctgttcgacctcggctttagctggtttggcgcgatcgacgccgtcctgccaaacgccggcgtcgccctcggcgaggggttcgtacagaagaccgagaccggtgcccgtgagtatcccaagtaggcgcctcttctgacgataccctcgatcgctgacgctcgcgcgtccctcgcatgctcgctcgtccagcggtcaagccctcgctcaagacgatggacatcaacctgacctcggtcctctactccagcgcgctcgccttccactacctcccgctcgtcaagaagtcgcttgtcccgctaccgaaccccctttcgtcaggatcagcagcggctcagccatcagcggctctcaaggccctcatcctgaccggctcgatggcctcgctcttcgggacaagcccagaagacgtcgaatactcggcctcaaaggcgggcgttcttggcatcctgcacggcctccgcgagcgctgcgacgaggaggaggtccggctcggcatggtcgcgccttactttgtccagacaccgttgcttcccgaaggctttgagccgccgctcggtccgtctttccgtcttccgccatcgcctctgagcgcagctgacgaataccatttgtgccgtcggcaggctggaccaagctcgaagacgtcctttacgccttcctcctcgccctgacctctgacccttgggctgcgccggccctaacagcccccagctcgaccactgccgaggacagctctgttgccgcctcctcgtttggagccaatcgggcggccgaagcagacagcgagctcccgaccgtgccgtcccggaacggcgccgtcttctctatcccgggaggcaacaagggcgttgtagtcctcgacaagcgtgggctcatgcccgttggctgggttcaggccgcctctgcccgccggcgccaacgcgcaggaggcagggcgcccgaggcaaagctctaggggccattgcgccctgctgtgcgtctgccgttgcacgtctcgtttcggtgttctataccgcccgccccatctcctggcgtccttcgatcgttgtatctctttcgtctgcctcgcaacaacagacactgggagagccctagccaggccagaagcacattcggaaagcatgcgctccttttgccttccccgccgactgtactcgccctcggcctatgatgtcgacattcactgcttcccgcccgtctcctcgactccatcctcgcctcagtagttactgctgacgatcatcagatgaggcccttctccttgagcttgcgctcgacgacgcgctcgacggcgtcttcgacgagcttggcgagcgcgccttgcggctgctcccctggtgctgtgctctcgctcagccccgcgagcgcgccctcgacgccggcgagaacccacttgccgacggcgtcgcactcgacgttgacccgatcgccaacctgcttgcgcgtcatgacgaccttctcctgcgtgtgggcgatcagcatgaccgagaactggcgctcggccggcttgatgccggtcagcgtgagcgaggtgccgtcgagcgtgatgtaccccttggggatgagctggccgaggataaaggcggctgagccgacgtgcgttcgaggagtcagcgacagcgagcgcgcagcgcagcgcagcagaagggacggactgtagggcgagtcggccggcagctcaaaggtgtatccgagcgagttgcctatcggctcgacggccttgatggtgcacgttccgtcgacgtggccctgattcgttcattgtgagaaggtcgttgggtcagcgggctaaagggatcgatgacgatcgaccagatcggccgaacaagctcgcacctggaccatgtgccctccaaagcgggtgtgcgccgccattgcgcgttcagtgttgacgtagtcgccgaccttaagctctcctagaagacaagagttcagagcaaggcggtcgtcaatctggtgtcatggtcctccttccgcacgtgccggctgactcaccgaggctcgtccgctgcagagtctcgggcgcaaggccgactttgaaccagccgccgtcgacatcgaggccaaagtcggtgacggtcaggcaaacgccgttgacggcgatgctgtcgccgatcgagcagtcggtgaggatgggagcggcgtcggcgaatgtctgggtgaagccctgcccgtcggcggagtcttgcggcgtcagcgacttgagtcggacgaggtgttcgatctgcagcgatagtggaagcgtcagcttggacagcatccctgacgcgtacgacggcaacgtacgaggccggtgaacatgctgggcagggacaagagcagtgaaaggcgaggagggcgtgatggacgttgcagtctcgagagcgagctctcttcggctcgcgctgacgcgccgacccctccgacggtgacccctgtgcttgatcgtcggacgcttccctcctcttcctcggctcgctcctgatgcccacgatgggcctgcttgcacgcctcttcgacctacaccgggtgtcgacgtccgaggccgatactcttcgacgtaaggttcggcgcaaggagcgcttcgcggccgcagcgaagcggcatgcgtcgaccatcgcgtttgtcctctttgacctgccgacaagaaggagctagagctgacgctgacgctggcctgccctgatgcagaacgctcatgatggtcgtcggcgtcgtctgggtgcttgccctgccgttcgagcagctcggcgagggcaccaagattgacgagcacgcgctgcagccaggccaggtcggtgcacctgtcgtcttcgctgattctgatgcccggaccctgattttcgactgccctacgcttctcgacaggccaacacctactacggctgggactcggtccagaatgccgaccgatatctcgacaagctgaacggctgggcagcagacgacgcgccgttcgagctgttcgtccccccccccccgcgcgtttcgtcagaacctgcaggccctgaccagaacaacctcattctcctcccacagcttcgccgaccaggtcaaagacgagtttgagcttctcggcctgcaggccggaacacaagagtactccttccagacctcgctcggcccatgccaaggcaagaatgtctacgcagcgttccatccgccacggacgagcgggaccgaggcgatcgtccttgccgccagttgggagagccttggcttcgtcggcgactatgacgaagggatcgagctcttaaatcagccgacaaagacgtacgagggtcgtgacaagacgcctcgactgaagaacctgcgcggcattgcctcgctgctgagcttggccgagtacctgcgaggtgcgacccggctgtcgagatggctacacctggccgacctcgctgaccagctgctctctggccggcaggaaccgagcactacgccaagacgatcatctttgtcatctcggaccaccatctcgacggcatgcaggcattcctcgcgtcgtaccatggcgtccagcagaccagtatgtggacgcacagacagtttctgcagatgcgcaagtctctgacctcagaccgtcactcgacagatctcatagcgcaggacctcgaaggcctacagaagggcgtcatctggacggcgctttgcatcgactacccgggccacagcttcagccatctcggcgtctactttggtgcgtcgggtaggaatgtttggccaggcaagctctgccaactgacctgtcctactcctcgttccgtcagagggcacgaatggccgcctgcccaaccaggaccttatcaacgccatctccaacattgcccagttcaaggcctcgatccccgtccggctctaccagcagtcattcgagctggcgccgccggcagagcacgagactggccctttggcctgggctaagcgcctgacggccgttcaagagtacttccgtgcgggatcgaacctcgccgagcactggcgctggacaggctccggccgggcggccggcgtgcatggcgttttcttgcagtgagtcctcattcccctctgattgctctgggccccggcgcactgacgcggccctcgcatcgcctataggtatcgcatcgacgccatcaccatctttgccctgccagcgctcggtccacacggcttccactcgctcggccgacttgtcgagggctcgcttcgagcgatgaacaacctgctcgagcgcctgcacgcgtcgctcttcttctacctttacctgcgaccagggaggacccacaaggtcggctcctacctccccgcggctgtcctcatcggtgcaggcctctccatactcgccctcggccgctggccacgcatcggcagcttccgcgttgacggcacgcgtgggccgagaccggtcctttcggccatcgcgctcatcgtcctcacccatgttgtttatgccggcttccttgcaagcgggacccagcacggctggttcgaggcgatgctcgtgagtctgactgccagcctctccgctttcgagctaccgctcatcgctgcctatcttggcgctctattcagtcaccctacacgacctcgtttgccagcctcggcgccgctttcggcggcctgctgatcagcatctcgctgccgcgactgtcgagcgccgtaccgaaacctccgacacggcttcggcttcgagtcgccgagctcgctcggactgtctcgtgcatgacgcacctcctcgtcggcgcggccatctcgacgctctcaatgctcaactttccgcaggcgattgccctggccgtcgtgacgattccgccgctgctgattgccgcgcccgtctctcccgcctcgagcgagccaaaggccctcgctcgcccaccgtggcgcaagacgctgtcggcagttgtcctcgccgccttttcgcccatcggtgtcgctgcgatcctctcgacggtgctcggcgacgatgtcgcccggctcgaggtgcgcagcctgatcgaggagtgggagctcctcggtgactggtgctgggtcggcatctgggtcgtctggtgggcggcctggctgcagacactgctcgccagtacgctctgcctcggcacctgattggcgcgacctcaatagatgcgacctgctttgcggagccgaccaaaacggcgccagggccacgtatgttgacgctcagccgactctctctttcctctctcatttgaactgttcatcccccgctcgccttggctgattcggctcgaggttgcacagccgtccgcgtgtcggaggagttgcgaggcggacacgccggcgcgtcgtaagtcagcctgcgacgcgtcctgccgaacctcgacctcggaccatcacccatgactctctggccagccctgccagtcacccatacccatcctcggctcatagcacccacgccctcgttcaccatcttcatccgccactcgacctgccgaggccgaccccgaccgcgccaccaatgtccgtctcggccagctccgccgccggcgtcggcgataccgacggcccggccggcttcctcctctcggttgtctgcgagctctgcttccgcgacttcctgccggccgactcgtccctcgcagtgccgttctgcgtctcgtcctgcggccacatattttgcgacgagcaccgccgtgcgcgacttgcccttggcctcgccagtgggcgcatctcggcccgctgactacccttgcgccttcgacacttgactcgtgccaggtcacgccaaccagtgtcctgaatgcggccgtcagggcgtcaccgtcgagccgttgacagcgcaggtcaggcgctcgtgtcgtcgccaccccaagccgccgaagactcgctgatcgcccgcgccctcctcgagcagccgccggcgccgatagctcacttctttgagccacttcctcgcacgctgcagcaagcccagcaggcagtctcggttcgtttctagggacccttgcaacctcgcagaggttcgtcaactgacggccgacgtcactgcacggctccgcagttccagctcgcccatctccagaagatcatccgcttcttcaaggacaaggtcatcaagcagcgggcgcgtctcctccgtccctcaatctcatgcacttagctgaagccggtcattcctcgcaggacgtcctgaacgaggtccgctcgaggctggaggcgtcgaccaagacggcaaagtgcgtacaaacaccgggcctcatcagcaaccgcgcatacatggatctctgacggcctctgcgaacaggcgtgtggtcaccctcgagcgagagaacgctcggctcgtcgccgagcttgagagattgacgcagacaagcgtgccgcctccgcctccgccgccaccgctgccgcacgacaatccgtccacggcagaccaacgcaagcgaaagcgtgacggctctggcgtcctcgaggacagttctgtcaggtgagcgcccccgcaacgcagttctgtttgcgtcgttgcacgctgacgcccacacgatcgcagacctctctcgccggcgtcgagcgcctcaggccaacggaccaacgcccctcagcgctacacgctgcctcaaaatagcgatcaccaaactttgcagccgtcgagtcatggcatcgacggtcggcaaagccgagtgcggatcggagaggcgagtggtggtatagctggccttcagtacgttcagtgcaattgaccgagcgactcggaacttgacctccgctgacgcttcgatttccggtcccctttaggcagtttgcgtaccagccgccatccgaaaggtctcgagcctcgacacctcgtctcggcacaggtgacccattctcatccgctgcacggcctcaatttctcgcgccgcccaatgactaccatcggcaggcgtacccaacgccaaactctgcacgcatgcaagtagcgcagccagccagtacactacctcctcgggcgagcacgagccagtcgatgcgaggcgcgtcggtccagccgatgccgctgccgcaacagcctcggcctacgtcgagtcggaccgtcttcacgaacgatccaagagatacgcgattctttcctaggcagggtcagcgtctcgtctaacttgacagagcccgtagtcaacactaataatgtctacttcaaccccacaggcttcgaaccgcttcgcccgcgccatcctctgcaacaggaggtccactcaaccggcccaccgctcgagcccggcttcgcacatcaagctactcggtcgtcgttgagctttcccacccgcacatccttcacgccgtcgacgccgagacgagctccccagtcgatgtacggctacaaagcccagagtggcggctacgctggcgactttgggccgcctggaggcagcaggcaggcgccgccgccgccgctgccgcctcagcgaccgatcttccatcaagctgggcggggctgagcgctgcgggggtcaggcattgtgatcatgaaatttcgtccattgagcgtcggactagtgatgagatcggagatgaggtgaagggggcgagctcggaggcgctggcccggggttgccgcagaaggagagtcgatggcactcctctatcatgccggcgctggggaacacgggccggagctcgccgccttgcctctctcgcgcaagacgctcccaatcgacgtcgagcatgccaatcagccggcgatcgatgctgtcgaccgtcatttcggccgggacatagcggtcgatgctcgtcgtcgcggcccgcttgatcatcgcaaccgcctcgtcgatcgaggctgtgcgcgagagcgagtagacgtacggctcgccgagaagggcggccggcccatgctggacgagcgttgagttgaaaaggtcccagccgtctggcgtcggcgtcggagacgagtagggcaggacgacggggacgccttggcagctgacgagggcgaaaggagcgatcgagagtcagcagggcaggaggtcgtccaggaagagacggctgactcacagcgcgttgtacggcgaggggcttgttcccgggttgccgatcccgagcaggagcttcatctcgccgataaactcctcgtactcctgccgacccatccgctcgtgcggcacgacgccggccggcaagccggtgccgtcgcccgtctcgtcccgggcggacgagatgatgtcgaggccagttgcctcgacgacggccatgtagagctcgagcggccaggcctcgggtcgggtgaagtaagacgtcttcttggcgaggagcaggatcgcatcctgccgcgcctcgtacgggagtacggggatgtcgtcgcagccaatgatgttgtagccgctgcaggtaaagcacagatagtttagtccaacgctcgggaagaggcaaatcgccttcgcactcacagatacgtcaggtcctctggcatcgcgtacgggctgagcgtccactctgacccgagcgggttccagctccagcggcccttggccgcctcctcggccggcacgtaccagacaccgtggtcggtcaggacctggtgctcaggatggccccaccaagacgtcgcgaagagcttccacggagggctgcaataatggcctcggtcagccgcgcgaaacttcagaggtggcgaaaggtccagccggagactgacatgcccttggggttcgtcggcgacgcgacgcagttttcgttcgagagacattggacgagaaggccgtcctcggcccagacgtgggtgatgatgtcgccgaaccagctgtagagctggtcgatgtgttcgggctgagcagctaagtagaaaacgccgttccgcttgaacgactcgagctgcaggaggttgaccgggtcagctgagagtgtatgggaagggtacaagatggatcgaggctggtcgtaccatggagcgcatccagatggtctcgccggcggtgtggcacttgagcttgtcttccgggctgagcgagggatcggcgccggcaaaaggggcaaagaagtcaggtgaaagacttcgatctcgaagaacgtagtgacgactgactctagcttatccgtcagagcacacgcaaagtatttgtacctatgggcatgggaaggagtggatgccgatcagcccgtgcgagtcacaggcagcgcatggcaggtgaagggtgcagacgcacccgacgagcacgaccttggcgccggcgccagcgcgcgagcacctgccgccccagcggccctcctcgaggcacgtccgcagcctctcaatctggagggcattctcagccggcacatagccgacgtcgtcaaagccgccgagggtgacctcgagctcctcgagccgctcgaggtgcgcgagccggcggtctggctgggtgctgtgcggcgggaggacgggcaggagcgccgccggccgcttgcctacgacaggggcggtcgcattgagaaggaacgtcgccggccgattcgcgagtcggtagtgcgacggcgggaagacggcgaacgggctcgtacgcgagctcgaggacgtgaggacgaggaggatgaggagcgtcgtgcagaggctgatggcgagcaccagccgcaacggccgatgagcggtcgatcccgaggcggcagaccggcagcggtccatgtttgcctctaggccgtgtcgcgcagacgacggacttgtcactgagggcctgtcgatggcctgggaggccggaaagggggtcgacgcgaaagggttgaagtggcgagagcgacgcgtccagcgggattgggcttccctccggcgcgtcttcaaactcgtcggccgccgggtcaaacgacagccttagtctcggcgtcgagtttagtcaagtcgtccccggccggcgtggtctgcagtctgtccatcactccaagctgcaagattctgtttttcatcatattcatagggctccgtccgatttactggaccgagacgagcttgacctcgaagtgaagggtcgagttcttagggatgccaggaagggccttgctgccgtaggcgagcggggccgggatcgtgagcttgcgctcgccgccgatagccatgccagcgacgccgaggtcccagcccttgatgacctcgcccttgccgaggacaaagacgaacggcttgccgttcgtgttcgagtcaaagacctttccgttggcgagcttgccaatgtagcgcatgccgaccttcttgcccgacttggcaacggcgcccgtgccgagcttcgagtcctcggtgacgaggccgttgccgtggaccttcttgctcgacttggcctcggccttcggggcggcgccggcaacagcagctttgggagccggggcggcagcggccttcttctcctcgacggccggggcaggggcagcctcgcccgactcgcccttgagcttcttgttgagcttcttcttctgcgacttggagagctcctcggtcgacgtctcagccgagcgcttgccgttggtcggctcaggcacctcggtaatcttgccggcgagctcctcgtcgtccatgctctcgtcctcgtcctcgccggcaaagtcttcggggtccatgtccgagtcgtagtcgtccgagtcggggtcctggtccatgtccgagtcgtcctcgtcgggcgcctggtcaatgtagttgcccgagaggtggacgatgctgaggatggcgagggagagggtcagtgtcgggcgaagcgcagaacacatgcgcggtgggcacgcacttggagcccgagacggtgaagatgagctcgtcacgctcattgaacgtgaggttgagctgcgactgctcggtacggccggcggtgagcgacgtgaggacggtcgtcgtgtcctcgaacgaagcctccgggtcctcgtcgtcctcgtcgtcgtcctcctcctcgtcctcctcgtcctcgaggtcagaatagtcgtccggcgtccggaggtacttgtccgggatgacgatgtgcgtcagcttgaggacggaccggcccttggggtcggcgaggtcctcgccgagctgtcggaagaacgaaggaacgtgcgagaagcagagatcagcgcccagctgaaggcgggggaaggtagcgcgctgcggaaaggtaggacgaacggcggcgttggtaagggtgaagtccttggggacgacaatggcgagctcctttccctgtaggcagcagagacggagagactcgaggtcaggatgcagcttgggaagcggtagcagctcgtgatgcagaaggcaggaggacgaacgggctcgacgacggcagacctgaggtcgggagcaacagcggcagcggcaggagcctcagccagggcgccctcgagagctgcgttcgtgacagatgacgtaccagacggcaaccttgatgggggccatgatgaagtgtaggaggggaggttagggggttgggagatgagacgggggttggtgggcgtggactcgaagggcgagaagctgcggcagcaggcgacggccgcctgcgcgcccccaagttttgctgattttcggcagccagacgagaattcacctggcgtctcgcgcgcgcgcgcaccggccgggcgcagccgctgtcatcccgtcgtctctccgaacgcagccatcgcacctccttcagcccacccgacctcgcctgttctcccgaccgcttctgcccgtgtctgtcttcagctcgtagtcatggtgcgttcagtttcttgaaagccagaagtctcgtcctgcacgaggaacgctgttgagctgactgaagctgctcttgactgccccgatcgcctgcctttcgtcgtctcctgccagtccaacgccctccggccatacctggcagccgtccgctcaacgctcacagctgccctcacgctcgagaactttggatcgcaggtgcgtaccttcctgtgatagcgaaagagttacaacggtgggacctgacgaagcccgccggctcgctcgccgcaggttgtcgagcggcacaacgtcccagagattgaggcccggtgcgttccccttcaaagctcgactgcatctcgtcgtgactcgaccagccgagcggtctcgctagtgcgtcggctgaccgcgttttgttctccaacctgcgtctcgctcggcaggacgtcgcccgaggttctcttgactccgctgacgatcgtccggtccgagaccgagcgcgtcctgattgagccctcggtcaactcgcttcggctctcgatcaagatcaagcaggccgacgacattgagcgcatcctttgcaagcagttcacgcgcttcatgacgggccgggccgagagctttatcgtcctccgccggaaaccggtcgaggtgaggctccactccctatgccatgcctcggccgctgtgtccgactgggcgggcaccaggagcccagcaagcatgctcgctagggctttagccacctctttcacctgtcgttgactctgcgtcctctacctctcgccaccgcagggctacgacatctcgttcctcatcaccaacgcccacgccgagacgatgctcaagcacaagctcgtcgactttatcatccagtttatggaggacgtcgacaaggagatctccgagatgaagctctcgctcaacgcccgcgcgcgtattacggccgaggtgcgtccccgccaccagcagagcgcaacgcacccgccgccggtgcagcgatgtctcgtccaataactgacgccttggtcatctgcgctctatctgccctcagtcatacctcaccgtcgtaagtcccttccttgaccgcgtgacctaggctggctgcaacagtctccggctgccgccttcatcgccacccggtctgcctgctgaccacgcctcgtacccttgctctacagttctgctagagttatcgacgccctccttcaccttgtacccctccctggtctgctccacccttgcaacacacccctttgacgtctactcatgatctacaaccaatcgtagaccgcgccggtcgacgcccacagggagtagcgtcgcccagcatctctaggaagtgtgcggtgcgcccgcccgggcaggcacgcgcatttagttggctttcgcctcctctgccggcggcagcgcggcgacccagtccgggaacggctgcttaaggcccttgacgacgtcggtcgcctcaacgagcgggaagaggaggtcgttgacgagcgcgtagccggccgacgtcaggtggaggccgtcggagaagagcgggtcgagcgacttgcccgacgagcggtagtcctccattgcctgtcggagtggcgccagacacggttagctttgttgatcgcaccgtccaaggctgagcagccgggagaaggggggcgagtcgcgcgcgcaccttccagacgtcgacaagcacggcgcccttaacctcctcacagagctccctgacggcctgcgcatagcgccctgtctgctcctcgctccggtcctccttctcgtggccgcggtcctccttccagcgcgttggctggatcatcggcggtgtcaggacgaacttgggcgtcgaggcggggacgagggcgaggatcgccttaaggttagcgacgtaggtcgggagcgagacggtttggcgcgaggcgttgccgaagaggacggcgtcgttggcgccttgaccgcgccggcaatagggcatgaggcgcaaagagggggcatccagagcgtcagcagggggcgcaacgcgcgctgttgcaaaggagaacatcgcgcaccaagccaaagcgtcatgaatgcaacgtcctgcccatggcccaacttgggttgcaggatctcctttgcgatcgggaggaccatctagcaggaaggaaggtgaagtcagcgcgcatgcttcgagagcgtcaaacgactggcctcggttcacgcaccgtgctgttgaagccagaaaagcctcggttctacgtccggcggtagcaagaaacaaggggatgaaaaaggtaagaagaacaacactcgtcagagctgaaagggaagccgggcagacgtcgggccggggccgaggcgacagggcggacagaccttgacgtcagccacgcggacgaagcgctctggcggtcggatgatcaaaagggacgtaagatcagcagtagcccgcgctcagccaatccagactcagcatcaagagacgcgccgttcatcttggtcgccaggccatcggggacgttggagaactgggtgatgctgggacaaggtacaagagcttcctcggtcagcaggagggagcgaagctgagctcggtgcaagggcaagcggacggacctgtctccgaggaggacgatgcacggctgggtgtcggtagcgatagacattgtgcaagatgaaggaaggtagagaagatagcggttcagagagagcgacgtccgaggtcgctgcgcccgggccgaggattgagccggcgcgtctgagaaccccgtctgggcattacatcccaacttctggccagccctcgaaattcatggtgcggcgggcttcgaccttcgcctcactcctctcctcctccgccctaccgaaaagacgacaaccagctctcgctttcctcgcccgccagttctcctactcgcaggctttccttccttcttcagcccgccatgaactacgacgacgacctgtccccgctgcccgcagtcgccggcggccaggacgacggccctgcgcagagcctctcggccgacgagcaggccaaggtcgcccaggccgctcaggtccagcagcagatcgcccagcagcaagccttccaggcgatcccggacgacgtcctcaagttcatcgtcaagttccaccaggctggtgcgtccgccttgctgtatcgccgctgctcatgactgcctcccggcctcgagcagctcggcttcggtcgcgcacccttgttctccggcagctgcgagcaacgtagctgacccgtctggtctacctttgctgacccgtctggtctacctttctcttccgccgcagtcaaggacaaggacatgccgacgatgacggccgcctacgagcgcggctggaatcagctgacgacggcgcactactcgcagagcgagtggccgagcgaggagctcatcgccccgctcgtcaacgacggtacgtccgccacgtcccgtgcccagctcgtccttgacgtccacatgccgaagtccaccgctgcctgatgtgcgcgtcctgacgagtctcctgcgcatcgcgcgctctcgcccgcacacagaccagatcttcttgattctctaccgcgagctctcgtaccggcacatttacgcccgcctccggcccaacattgacgaccgcttccagtcctacgaggttcgtgcagcgcgctcctgtcaattgtgggcgtgaagagctgacatgaaatgctcctggtgctagacctcgtgcgagctcttcaacctgctgcttaacagcgacggcccggtcgacctcgagctaccctcgcagtggctctgggacctgctcgacgagtttatctggcagttccagtcgtttggccagtaccggtccgactggaagaccaaggccgaggaggagatggccctgcttgccgagggcaaccaggtctggtcgtgctactcggtcctcaacgttctttactcgctcatccagaagtcgcggatcaacgagcagctcgaggctgagcaggccggcaagtcggccgaggagattgcgtgcgtcgtgtctggcttctcgctggtcctgtgcccgccacgtgctgatcacgctcgcttcgcctcgctctagcgagatcgctggcgagtacggctccaaggctctctatcgcaaccttggttactactcgattatctgcctcctccgtgtccacgttctgctcggcgacttcacgctcgccctcaaagtgatggacccgatcccgctcacgcgcaaggccgagttcaccaaggtgacggcctgccatgtcgccctctactactacgtcggcttctcgtacctctcgctcggccgctacgccgacgcggccaacacgtttgtcagtatcctccgctactactcgcgcatgcagcagttccacacgcggtcgtaccagtacggcgccatctcaaagacgtgcgaccggatgtacgccttgctcgcaatctgcacgagccttgcgccgggcccggtcgacgacgcgagcggcatcatcccagcgatgaaggagcagctcggcgacaagctggccgagatggcccgcggcgtcgacgccctcgacacgtacgaggagctctacctctcggcctgcccgaaattcatctcagccaacccgccgccgtacgaggacccgtcatcgtacgcgctctacacggccgacccgccggcggacccgcccgcgcggcacgccgccctcttcctcgacgacgtacgcgcgctcgctgctgtccccaagacgcggtcgctgctcaagctttacacgtcgatcggcgccgagaagctcggcacactgattgacgaggacgccgagcgcgtgctcgaggacatgatggtcctcaagcaggcgagccggacttataagaacggcggcgaggccggtctcatgaacggctcgcgcgccgtcgtcaacaacctggacttcttcgttgacaacgtgcgtccccctctcgaggcggggcctctactcgttctcggctgacaccctttgtccttcaacagaacgtcatccaggttcaggagacgaccgagtcgcgccggtttgcgacccacttcatccgcaaggccgaggccgcccagcgcgtgcacgacacgatccgggccgcgccgctgccgatctccaagacggcccccgccgcagcttcggctggccaggctaaccggtcggctgccggcggtgtcaagtcggccgtcgctgccgttgcatcaggcgcacgcaaggtcgtttggggaaccgcccggtagacgacgagaggagccagccccatcgttcgcgcgcggcgtgagtcgatgagcaagcggcgcgggcctgcctggcgtgcagatgcccgggcccgagaggaagagggccgagaggcgagcccgactagataaatgccagacgtctcgtctatcacgatgtcctgccattctaaaacgacctttgagctcgtacttgttgcaagatcgtctctcgcgtgtcgtcggccgacaaagtggcagcggtttcgggcagtacggccgccggttgtcgcgcccgttcgttgcgctcgaccggacgacaacgacgacgacagccatccttgctgcccgagagtctttctctctttctcttctgccacgcctctagcttaagagcagggccaactctcaaagaggcgtgcttgctcgagatgagcctctctggcgaagggtgcgtctcgaaggcagcttgtgtcggctagctcacttcccgccggcgtcattcgctaaccctgactcggtcgtcctcgtcgagctacagcagccagggcaaggcccgtacaccggcttccagctcatggctcgaccagcgggccgacgtctggactgcgctcgataagcgaaaaacggtcgtcagcgcgaccatcggctccctgtcgtcgacgttcctcggctatccgctcgacagcatcaaagcccggctccagacgattcgagggccagtgccgtcgttgccgacactgacggccagcatcctgcgcgaggagggcgttcgtgggctttggcgagggtgcctcgtcccgctcgtcagcatagccgtcgtccgtgcgtgcaccttcgctcccctcccaacttccgccgtccagaccggctgacaacaaggcccgcctcttgacagggacgacgtcgttttcgatctacactttctccaagaatgagctcaaccgacgagagacctttggcaaaggcatgagcgcgctctggttgacgagcttcgtcgccgggtgcggcaccggctccatcctgtccctcggctcgacgccgttcgagctcgttaaggtatgggcaagcctcagtctgccgcaaatggcggtcgctgctaacccgaggtcctgtcttaaccttgtttgcaggtctatcgccagctcgaggtcatgatcgccaaggagcagggcatcaccagtgtgcagcccctcacggcccggtcagctgccgccgctctcgtccgatcgagaggccttgccgggctctacaccggcctgggcccacacgcgattcgcgacaccttcgggacgggtctctatttcgcagagtatgacctgctcaggcagctgctcggccgtctgccggatgggactcagggcccaacgcccacctggtcgccaatcccagcgtccctcacgccgctcttttcgggcgctcttgccggcgtctcagcctttgcgatcgtctacccgataggtgcgttgctcgcacgcaaaatgctgtctattgacgcttgctgaactcgctcgtccactgctcggagcagacgccgtcaaaaccaacatgcaaaagagggcgctgtcgaatcagccgtaccgaacgatcccgcagacgctcaaggtcttgctcgagggtccggatccgttgcatccccagccgctgtcgcgcggcctcgtccggctctatcgcgggctaggcgtctcggcggcgcgttcctgcttcacccacggcttactcgtacgtccgccgtcatcgttcgcacccagctgcaacgagctctgaccatcggtccctcttgcagtggctcgtcgtcgacaacgtcgtcacgttcattgagcgtcaccgtctcgcctccgccgagctcgcatcgtcggtatgagccatcaacgccgcctcgatcgtctatgcgaaaaactccgtaccgccagccgatccaatcgaaaccaccagcatctctcgtaatctctcccacgtccaccccgctcgccgcaccactcttcattgtactctcaacccccacgtcgcttccctcgctcacatcgctgcgcaccttatagacccacgctcccgccctcccgcatagacatgtcgctgtcgtatcaagtccagggctcatgaggtcgataaactggcccagccgttgctacgaacggtcatcccgctgcagaggcgtatactcgcctccactggcgacgccctgccaccatcgaccgagtcggccgctagactttgctcctgccgtctcctggacctcatttgcctttccatcaggcaggacgcggaagcgccggccgcgccagacgacatcgctcccgagcacggcgacggcccagaccggcagcgcgagcagctcgcgcgccgcataggcgagcaagagatgcggcagctcggcgagttcggccgccggatcaggcgcgagcgacgtcaggacgagaaagtcgacggtcgcccagccgacaaagtggccgacgagcgtgagccagactgggaagggcgccgcccaagcaacgagcgcgccgacgacgacgctctcggtcagcggctcgagcagcgtcgccacctttgtcatctctttgcggacgcggatccagcggacgcgccgccagaagtagtcagcaaacgacatggcgccgatgtggttgagcgcgacgtcgtgcggcgcgagcacatgacgcgtcttgagctggtgcatcagcgagagggcgagcatgttgtcctctgcgaggtagggcgagaaggatggtaggcctgtgatgagcgacggtgaggccgccgtagcttctgccgggacggtgggaggggtcgggcgctgttagcgcggttcgtcgagcaagtcaaggatcgcaacccgttgcactcactcggcggcgtccggcccggcgtgaggttctgaacgtccgatcgccggtagaagttcgatttgcccatgacgcacgagtcgatctcggtcctggtcggtgcagagtgagaggtgacctcagtcagcccggatttcgacgagggcgtaggagggaggacggacctgtttatggccaagtacattttggcgtggttcgtattgagaaaggcgcgctcgagccagctgccgagcccgcggttgccagggggcggaatgacggcaaacgggacgtggtgcacgaggctgacgggtcgcctgccctgttgctcgaacgacggcgagagcaggaaggcgtcaaccgaccgggcgaggtgctgtggcgaggcgagcaggatgcccgagtcgagcacgtagagcagatcatacttggcccggttgaagggcttgtagaggttgttgagcttcggattcgggccgaggtcggtgtcgcctgcgcgcagaggcaagcgtacgacggcgtcagctcacgtcaggcgagtcgagcagccagaagctccactcgcgacgcaccgacgatgagcgagatgtcacgcccggcttcgccgccgaagcggttgatgagctcctcgacgacgcggaccgacggatcctcggccgaggcgacgctaaagatgagctcgagcgggccgtcgtactcctgcatgcaggacgagagcaggttgtcgtagaggttggggtcgagccccttgagtggccggaggacagagacgcccggctttggcttcagtgatgacggggcgggagcaggtcgacgccggtagcgggtccatctgtgagaggcagcgggagtcgtggtcagctcatggcacggtgcagggcggggtaacgagcgcgcgaagcctgccaggcgggaacgaaagactgacgcagtctgcagtccgaggagcgagactgcccagataaagcagtaccagacgaggatagcgccggccagggcgctcgtcagctgcgtctggaggtgcggcgccgtcgttgctgacggcaaactcgacgcggtcgaggtcggcgacgggtcggctggcatgctgacgggcgaagggggtgccatgagccggctggcggtcgtcgcgtgcgctggcagatccgtggacagctgtgttcgtcactggcagatagaaaggtgcaagatgcggccgaatggcttggctcgttcgtcgtcgtcgaggtgcggaggaggatgagcaggcagcggcggctccgagagtcgtctgcgcctgcgagctccggccgctgcagcagaagatggtcttgagctgccctcgcctccctcggaccttccttcacctggcttcaccttgagccttcctagaggtcatgctcttcaacgctagatgaagatgcctgctgggcacgaggtcgtggtctttcttgccgaggcgggcgacctccgccgctgcgcagccgttccgtccaagctctcgcaccgcgggtccagatctcatcctcgactggtctcctgcaacagtcatccctctctgacattctcgacgcttgctgcaatcggccagcatgacgactctgacgccctccatcctgacgatcgctgggtcggatccatcaggcggtgcaggcatccaggtcggtcgcgtcgtcggcgagcccgctcagcccggcagcccggtgttgacccgcgatccttcgtgatgatctgcccctcttgcaggccgatctcaaaacgttcactgccctctcttcgtatggcatgtcggtcctgacggcactgactgcccagaacacgcagggtgtccagggcgtccatgaaatcccggctgccttcgtcgccgaccaggtccgtccgtcgagccggatgccttccctcgctccgtctcggctcaactgctaaccttgtcggaccacgctcagctgtcgagcgtcgtctcggatatcgtacctcaggcgatcaagacgggcatgctgtgctcggccgccatcatcgacgcgctcgcgacagccctccgcttgctctacccggccggaagtaatctgccgccggtagtcatcgatccggtcaccatctcgacctctggccatacgctcctgccgacgtcggccatctcggccctcaaagcgcagatcgttccgctcggattcgtcctgacgcccaacgtgctcgaggccgagatgctcctctcggacgagggcgcccacggtgagggcctcgaggccaaggcaaggacgctcgccgagggcaagcgccggatcaccgacctcgacgcgatgctgagctcggcgagggaactcgcccgcctcggttgcccaaacgtgctgctcaagggcggccatctcgcgctcgacctgccagtcgtccaggcgcagctgcgagcgctcacgcaggccggcacgctcagtcccgctgacgtcctctggcccgaggacgaaggcatccggatcctcgagagcatcaatgggagcagtgctcaggagaaagtcgtcgttgatgttctctgggagagcgccacgagccgatgcacggcgatcgtctcgcgcctgatcccgacgaagaacacgcacggcacgggctgcaccttgagcgcggcgctggccgtctatctcggcaagggtctgaatggtatgtcggtcatcagcgacgccaggagatcgttgcagatgctgacttctacatccctgcgccagttcgcgactcgaccgtgctcgcgcatgcctacgtccgcaagtcgatcgcgacgtcgtacgacctcggcgcagggcatggcccactcaaccacatccagtcgataacgtatcgacctctgccgccgtacgtctagctcaactcggcggccggcagtgcccgctgatagacgtcgccctgtcagtccatccacagccaatccgcagccattcacgacgcacctcatcaacagcatcaagccgctctgggagaagtatgtcaaccacccgttcgtcatccagctcggtaagggcacgctcgacaagcgtcgctttgctcactacctacggcaggtgcgtcgattgagggcccctttgagcatgcgtcaaggctgaatcgagtcgctttcgacttacaggactggctctacctgcgacactatgcccgtgcacacggtctgatgagctacaaggcgacgacgttcgacgacattactgccttctcgagcatcgcgcttcacgtagggcgcgagtcgaacatgcacgtcacggtacgttccactgcctttgacgagcgtcgaggccgtcggctgatcagatcctcttccaccgccgcctccgccgcctcctccagtactgcgagtcgttcggcatctcctttgccgacttgcacgcgacggccgagacgccaggcacgtcggcctacgccctctacatcctcgacgtcgggcaccgcggcagcctgctcgacctgatgctggccgttgcgagctgctgcctcggctacggagaggtcggcctccttctgaaggagcgcgtcgaccgcggcgaagatggctaccactctgagggcaacccgtacaagcagtgcgttgcgctcgtctgccagcccctgacgccgtttctgactgaagcccgtgcgtgtcccttaccccaggtggatgagcgactatgccggcgatgagtatcaaaacgcggtcaaggcctcggttggtcagtgcagcgcgtcttgcaacccttgtttttctgacagcgctgacgtcgcactttgctctgtacgacctgcagccatgctcgagggtcggatcgcggccgacccaccctcagaggttcgtcttgccgagcttgtcaagatctgggaggattgcacgcggctcgaggtcggcttctgggacggctcgatggacctacggttcgaggacctttgaagcagctagatcaatgactcaggcaggcttgcccgcgcttgcaaccttgccggcccatctttgcgtgttcactgacctttgctgactgcctccgtcttgctgctgtcgtcactctcgcggaccggccgccgaccgcgcaaggcaccgccgactgcgcatacatttgcgcctctcgtcgccgccaacgcgcacgagctaacatcggcataatcccctcaccaccctacctcaagctcacaggtcgaacgcgacccttttcgtcctactcgcacccagtgccggcaaatactcgtcccagggcgtcggtacagcggcttgccaggcgcccggccgacgcctcctttaggcaccacctgccaatcaacgaggcgccccttttcccgcagccacgcggtgatcgtccttcacatccaaaggcaagcaaccagggagtctggaccgctccggccgcggggggagggggccgcagaacgccccccgccggtcaaccggaagcctgctcccctccttccccttggccaccgaccgtcacccttgccctcacttctctcctggcatgtcgcccgtcccgaccgtctcgcccgtcacgggccagcgtgtgccggcgcactatgtccactcgtcctcggccttcttccgaggtgcgtctggcgccggtcggctcccgcccatcgccccggtcagtcggccgctccatccgccgagactgacgaaacgaccgtcattcctttctcgttgcgcagacaccgccggccgccatctcctcctccgaggtgtcaacctctcgggctcgtccaaggcaccgctccctcagccgtcgcagtcgctcgacgacttttgggaggcggccgaggccggcggcgagtcgttcgtcggccagccgctccggctcgacgacggcagcgccgacgtccacctcgcccggctcaagggctggggcttcaacatgctccgctacgtcgtcacctgggagagcctcgagcgcgagggcccgtgagtctaacctttcaccatcgacgagccagccaaggcttcgcgatgatgggcccgcaacgaaccgacgctccgagctgacgcgtccgcgcacggcccctccctctcccagcggcaaatacgacgaggagttcatggactacacaatcgaggtcctccgcaagtgcaaggagtacggcttcagggtgtgtccttgttggcctgacgtccggctgccagccgatcggctgacggttgtgccttccctcgtctaggtcttcatggaccctcaccaggacgtcgtgtgtcctcgtcctctcgaatgattgcagcggcaccagcttgacgagaagctgatcaccctatctcttacgtttcgccgtagtggtcacgcttctcgggcggctcgggcgcgccgtattggacgctccctgcttgcggcttcaaccctcgcaacttcaccgtcaccgccggcgctttcatccacgccgagtacccttcgcctgacgcacctgacccggctagcttcccagctatggtgactctccgcgcgttcatccttcctttggccttggctcatcagacgcctcttttgtgtgcagatctggggcaccaactacgcccggctcgtctcgcagacgatcttcaccctcttcttcggcggtcgcgactttgcgccaaagtgcatcattgacggcatcaacatccaggattggctccagcagcactataatgcggccatgatgcgcctcgccgaacggatccgtgaggcgggcgacttgctcgacgagtgcgtcatcggctgggactcgctcaacgagccggccgagggcatgattggcctcgccgacctcggctcgctgccgaagtcgcaggcgctcaagaagggcccgacgccaaccgcgttcgagggcttccggctcggcatgggcgaagccgtcacggtcgacaattgggtgcgctcgacctctcatcccgagtagtcccttctccgccgacgctgatggccacatcctgtcctatgccagaacttcaccgccatgggtcctgccaagtctggcacggtcacgatcgacccgaagggcaagacgtgctggctcgcaccggaagcagaggccaacggctcgcgctggggctggaagcgcgaccccggctggaggctcggcacctgcagtaagttgcagtttcgagagatggcgctgccaacggcccaacttaacgccccgccctgctctctctttagtatgggctcttcacggcgtctgggacccgtcgacgcggacgctcctccggcgcgactatttcgcgaccgtcccttccgccccgtccggctcggccaagctcatctcgttcgtgcccgactactggcggccaacgtgggtcatctgggcgcgggcggtccgcaaggcccaccccgaggcgatccactttattcagcctcccgtcttccatcagccgcctcagctcgacgagactgagctctgcggcagggcatgctcctcgccgcactggtatgacggcctcactctcctgtgcgtctctcatcgtcatcgaacggaacggaagtcgcgtgcaaatgttgacaggtctgccttcttgtctaccgcaggacgcgccattggaactggttcaacgccgacgcgctcggcatgctccgcggcaagtacttcaatgtcatccagtcgatccgcatcggcgagggcaacatccgcaagtgcttccaggaccagtttggcgtcctgaagcaggacacgttcgacatcctcggccagtatccgacgctgtgcgtctggcctgaacctctcttgatcgctgagagttcgtcggctgactaaagatcttctggcctggtttagcatcggcgagtgcggcatcccctttgaccttgacgacaaggtggcttacggctaccaagatggcggcaagggccggggcgactacacgatccaccagcgggcgctcgacgcaacactcaacgcgagcgatggagacaacgtcatcaactatacggtctggacctattgcgtcgacaagtcggtcctctcacccctgcttcccaccgccacggagacctcggaaagctgaccttttcctatcctctgcagttcgcaccagtggggcgacaactggaacctcgaggacctctcgctctggtcgccggacgacaccaaggcgggcgcacccgaaaacggccacaacatggtcgagcacgtcgcgccggccgagacagtcattgctcggcctgactttgcccgctcgttatcgacccagcgattgacgagcccatccgaggcttcgggccttgacgcggtcagctcggcaccgacgccggcaaacggcacggccgggcagcgatcgcttggcgagcgctttgacctcgaccgcgacattctgaccaacggctcgcgggccgtcggcgcctgctcgcgccccttcccggtcgcgacctttggcgtgccgaagcggctcgactttgacatccacgcggcctcgttcaagatgacggtcgaggtctctgccggcgacgttgccgacgagcggacgccgaccgaaatctacctgccctgggttcactttgcctcggaagccggcttttcgaccggctcggaacggaccgtctacaagggcgatgccaggtcgggcgtccggccccgggcatcttcctccggctcgtcctttgactcgcagcggtccggctcaccagcatcgacgctcgtcggcaaggccaacggcagcggcggccagcgcaaggagggcacggtccggatcgaggacctctccgacgcgagctcggcgagcgaaacgctcggcagtggcagcggccagatgacggccagccttccgccattcgagctcgaccttgaggtcatcgtctcctctggccggttcgaggtccagggccagacccttcgatggtggtacggcgggccgacggcggcttcgcggccgacgacctacaccatcactgtcaagcgtcgcggtggtgctcgcaaggagatggcccacccgcgcggccaggcgtcggcgctctggaacgtaagtgactggctctcttgaggggtccagtggcttcccggggtaaggccgccggccggggcccgctgcaggactcgtcgctgatgcgactgccccctctaactcgcgcagatgaaggctctcctcttctcgtggcttgctagcctctgggcgctctgcaagacgatcgtccggccgcaccggcaaaagaagtttgccctcgagggtgacgagagcgagcgcaagccggccgcgccgcacatgcagcagcgccgcgggcggccctaatcttcccggcccccgtatccttgtgaaactgtagacgaccgcgtccgttcaacattcttgatctgtagcactgtatcccatcctgccttgcaattcgagtggcgcgctactcagtcgagcggcggggcgcagaggccgcgcgaagttgccaaagtgcaagtgccgacgggcccggcctgccgcggcgcggcgggagagagagacgcgcgcgggcgcgctgctgagccagcccatcggcggcggcgcctgcagacttgcccctcctgcgcgggctgctgcttccctccgacacaacatcttgcctcgccctccctcagttacagcatccctccctgcaagcagacaccgacacacacgcacctttctccgaatcgagcaacctccctccaccagcagtgcctccgtctctcgcctccgccgtcctgcccgcaatggacgactctccgccgcccatgcccgggtccagcacgcctccgccagcccagggccgcgactcaaaggacggcagccgtgaccagcagtggcgctttgctcagtgcttcggcgacaagggcgaggtcgaggacatcaccgaaggtccgtcccttctcttccttcccttctccctctgaagttgccgacaggcagaaacaaggctggcgagagagggctcggaggcgagctccgcgggcagagggaggggcgatgggagccgacgatcacatcgcccgcaccggccaccatccggcctggtcggtgcccggcctcctggaggacactccttggacccctaccgagcctgtcgatgtcgtgtcggctcggcgggccgctgatggcggtcgggaggggtgagatcgtccggcaggcagcccgaactcgttcttttccgccgccggcgccatcacctccagctcgtgtcccgtcgccggctcacaccttcgttccttacggacgccggctgaccatgcctgtcgttgtaaacgtgcttgctggctcgcagccgacatcatctcgaccgtcgagttcgatcacaccggcgattacctcgcgacgggcgacaagggcggccgcgtcgtcctttttgagcgcaacgagcaggtacgcctcctcctccgttcgctccatcgtcggcccgtcagggtctgaggctgacccgtggtcccggacgatctctcgccgaacagaagaagggctgcgagtacaagttctacaccgagttgtgcgttacccccttcggcccggttcgagggagctcccgctagaggcgcaccgccggctgacgcgtaccttcccggtttatcccctctttcctcctttgcagccagtcgcacgagcccgagttcgactacctcaagtcgctcgagatcgaggagaagatcaaccgcattaagtggtgcaagcggcaaaactcggcccactttttgctgtcaacgaatggtgcgccccgcttgcttgacgtgccggagtagaggtggtagggggcgagggcaatggtctcgtgtgagagattgaggcctgtcgtagtaacgagcagaggatgggcgtggggaagggtcggttgaggccacgagcaagctgaggctcgacgctgggttaggagctgcctgctcagcttgagcaaccctgctgacaacctggcctcctctccttcgtcttttcctccttccagacaagacgatcaagctgtggaaggtctttgagaagtcgattaaggttgtctcggagaacaacctgtcaacgtcgttctcgccagcctccggaccgtcgtccttcctgccgccatcatccctccgactgccccggctcacccaccacgactcgatcgtcgctgccgtgccgcgcaaagtgtacgccaacgcgcacgcctaccacatcaattcgatcagcatgaactcggaccaggagacgtacatctcggccgacgacctgcgcatcaacttgtggaatctcaacatctcggacgcctgcttcagtgcgtgcttttgaaacggacgtgatctcgtccgctcgcgaattgtcaactgaccgtcgtgttgctgcgccatcctccgccagacatcgtcgacatcaagccgacgaacatggaggagctgacagaggtcatcaccgcggccgagttccacccgctgtcgtgcaacctcttcatgtactcgtcgtccaagggcacgatcaagctggccgacatgcgcgagtcggcgctctgcgacgctcacgccaagcgtacgtccctcggcgccgccctgcccgcgtgcgcgcgatctcgagttgacatgtttgcccttttgtgtctgccgccaccagacttcgaggaggaggaggacccggccaacaagtcgttctttagcgagatcatctcgtccatctcggacgtcaagttctcaaaggacggccgctacatcctgtcgcgcgactacctgacgctcaaggtgtgggacgtcaagatggagagcaagccggtcaagacgattccaatccacgaccacctgcggagcaagctctgcgacttgtacgagaacgactgcatcttcgacaagttcgagtgcaccttcagcggcgacggccagtgcgtgctcatgcgtttccccttcccataattccgaagcgcctttgctgattgagctctatcactccttgtacccaggtcggtcctgacgggcagctaccacaactacttcaagatctacgacgtcgagagcgggtccgacacgctcctccaggccgacaagtcggcgttcaaggccaagaagattggcggcgtcaagactgggcccaaaggcaagcagggccagatggagacgaccgggatcgacttcaacaaaaagatcctgcactctagctggcatccgagggagaacacgatcgcgatcgcggcgaccaacaacctcttcctttacagcgcacaatagagggagggccgagaccccgtcctcctctcggttctttctatccactcgctcttgccgtgcccctttgcctgtcccttcgtgcctacccctcacccttcgtctgttctctgccccactcggagcctcactgtgtcctttcgtcgcacacccaattcaccctttacctcgcgccctcaacctcctttgtaccaccgcttcgtcccctcagcgctcggccgcccctctacgccgcctaaccctgccccgcctctacggtgccctccgctcgctcctgcctaaccgccctcatctaacctctcgcaatcagccctagtccccaagagtctccatggccctgaatctcacgggcgggcgttcgtcacagacgtcacagacggcctcgcaacggcgcgattactgcgcgcgagtgacttgcgcgtgctgagccgccgggcagcgacagctatgttctcatccctgtcagactcctgtgcacgttttggacaggccatccttgtcagcgaaagagtcaccaagtgttggttgagggtaaaagagctcagatgacaacagaggacgcgtcgccgacagccgcaagcagctgacagtcggctccgccgacggcctcgcttcggccgcccttcgccgcaccctcgaccacgacctcgacctcgactcgaccgccggctgaacctctgtcgacggccctcccagctcgcgacgcgctcgccgccgaccagccagcacttagggtcgacgctctgctcttccgaaggcactgcccgccgcacacgcgacttgccgaaccagcagggttcgtcagcccctctcttgccgttccgccgctcgacgggacgagatcgaattagcacgtccgggtgagccagcccgcagatccgacccctcgtctccggtgccctgcgcttgaccgagcttgctcgctctcaccgactgcaaacggtcatggagagaagctcgtgccagagccatgtcgactcccctcgtacctcgagcgcccaagctcagacgcgacgtgccctcgctccccaggttcgatcgcctcgaccgtcggctcccgtacgccgcctcaacctcgacaacccggatcatcgcaacgcccagcgtgtcgacctcctacgtctcatccgccgctggcccgagctcggccaggggccggcggccctcgcacggcggccagcagctgccgggccattcggctggcaaccaccacgtccgccaaccgtcgcctatcccctcgtcagcgtcatcctctggcgactccgaacacgaagacgacgacgcccacccagcccgccgcgcaagcggtctcgcgcagtacggtaccggcggcgccgacggagcccgctggcgcgcagcccggaagaagggcagccgcagcggccgggccgagcaggccaagctcgttatgagcggcttcgcggcggtcgagagcagcagcgcgcccggaggtgagagcgatacctttggcggcggcttggccgaggaggcctggacgcccgccgtcgaacgccagccagaagcaggcacgtccggccggccgggctgggcctgggcgatgcccgactttgcgcgctcgcgccgtgcctcgccggcagtcgtcccagtcgagctgcccgatgcagccaccttcgcgcagctgctcgatgcgcgcggcgcgaccgagcagggcagccggtcgctcgccgagcagcagtcgccctcgtcaggcagcatctcgccgaccgttaccttggacggcgcccctccgggcggtgcgacacctcctggtgtcgctgatccgctctcgcaaagaggacgccatactgggaccgcaccactcggcccgtcgctcggcagtcaacgcttgggacgcccgactgcccttgcaccactcgcgccggtcttccccctcgtcctgggcggaagcccatggcgctggcggatcacgcgaacatggacgcatagtgcactggtcgttgctgcgctcggcggcatgtcgtacgagatctggaaggagggtggtcaggaagaccgctactgcgtattcggtgcgagaatcctcccctcgctcactcactttgactcgcctgctgattttcttgctttccgccagaaatcatcctcgtcgccttagcctcttgtgcctatgtcgtcctgcgtccgttccagtacccggtcagggctcgaccgcccggcctgttgacagagggctcgcgccagcggtctggcagtccagggcacgcgcagcatggagccacggcggcgacctcaacgagcaaaagctatggcggactcaagggtcacgtctggggaaccgacgaccgcaactatcgcgagtgctcggacgatggcgccgtcaccggcctcctcttcggaccactcgtctcgggctcgctcctcctgacgacgcttcggcagcgcaaagagggcattgtcacctcggcgctccccgacaattggctcgtcgaggccccactcgttctcccaacatcaacgccggtcgctgaccgagcaaaggcggtgctcgaagcgctcaccaagtcgcgccggtcaatgctctcgctttcgacggtcgtcacactcgttctgctgctgcagctcctcctctcgcgtcgagcagagatggcgctcatcttcaagtcagaggctgaggcctccgtggtcgcgacgccaggcgcaaaaccttccaagagtcaccatggccggagcaaagacgccgagaaggacaaggagcgcgacaggtggtgggtgcctcgcaacgagtggacgcggacaattcgcgtcgtcggccttgccttcgcggcgaccatcgttcttggctcgctcaaggccgtctttggctactggaactcgccgctctggcgaggtgcggcccttaccctcgcctgagtctacttcgcgttctcgtctgctgacctcatcctcccttgtgacagacctcagcaccatcgacatcctcatcgcgtcgctctaccatcagttctcgacttacgtctgtgtccgcctcgcgcgcaagggcttcacactcggcgagctcggcatcgtctcgcagttctccactgcgctcttcatggaggtcgtcaacctcactcgagcaagagtacgttggcattcgcatgggtcgaggtttccttgtcgctgactactgctgccctcttacgtcagatctcgctccgctttttgacgaccacctacgtccagacgtatcggctaccgtcgcctctgctcatttatcagctggcgctcatgccaggctcgtttctcgtcggctttctcctgtcgccgatcctctacctttcgcgctacatctcgcagaagccttcgcaccgcctccgcttcccagaggagaagaatcggcaccggcgcttcctcgcgctcggcttttacctcgggacgctcctcatcgtcggcggtctcatcggcttctggagcaagtggcagcttgactggcgtgacccttgggtctggatcgtcctttgggtcctcgagggcagccactggtggtcgcgaccggccctgctggcctactgggccgtccttgcaagcatcagcgtcaccggctgggagcttcagctcgccaagacgcggcacaagcgaccatggtcgacggtcggtccgcctggccgcgatgccggaggtagccccgtctcagcggctggaaagggctctaccggtcgtactgcctcgaccgcatccactaggacaagcaccgggcctctgtcgctgccggcgggcgctcgcgaaggagggaccgccggcggaacctatcgcccgacggcggtgatggcacgtgtgccgatcctctcgctgaacggccgccgtaagttcttccacggcctcgcgatcctcatgttcgtgccaggcatctactttgacgtaagtcctcgttctgccggtctaccattgtgctgtcgatgcagtgattacctaactccattctcaaccctttatcgttgcagccggccttcgcccacattgcgttctcggtcgcgtttgcgcttttcgtctttgccgaatacgttcgctactttgcgctttacccgttcggcgtcatggtccatctcttcctgaacgagttcatcgaccacaaggactcgggcaccgccatcctcagccacttctacctcttgacggggtgcgcgcttggtctgtggctcgagaggtgcgcacccgttttgcacatcgactaccatcttcagcgttgactgacacctgcgacttcgatcgtgcctgcagtccctccccgctgctctcgtacgtcggcgttctcacccttggggtcggcgacgctctggcttcgatcgtcgggcggcagatcggccgtcagcggtggtctcggagctcgggcaagacggtcgagggcagcgttgccttcgtcgccggtgttctcggcgcggtcgcagccatgcgccttctcggtatcgtgccacccgtctcggtgcgtctgctccctctcacgttttgaccacttgcctgcagctgacgtttccgctcctctctcgcagccgtggaagctcggcatcacttcgctgagctcggcgctgctggaggcagtgtcgaaccagaacgacaacctcgagataccgctctacacttggaccgtcatgtcgatcctcgggatgtgatggacgtctcaatttcttccgccttcggcagtcagggcctccattcgctatcctttttcgtcaccgccccgaaggccgctgcttcgtgcgataggcgtcctgttgctttaaggccgtggctctgtctctgcagggccgtcgtttcctgatcgccctcagctctagtagcgctggctggccggccgatgtcttgtcaacttcctgtctgcccacgccagaccaagatcgtcctctcttgtctaagccacgcacctgtgctgtgcactatatatacttcatttttgatcaggacttccatgcatcggcctcaagccggcgaccctttagctcagtggtagagcgtgagattccaaatctcaaggccgtccgttcgacccgggcaagggtctcagcttttgctcgccttttggcggatcctgcctgtgcgcagacggtcgtctttacatgggctccagtccttccagaacaaggttgtcaagtcttcagaattgagatacaacggagcgagagatacaacggagtaggtagaggtcggacgaggactgggcggtcaggagtaggtggctgagaggcggccgacgatgtctgcgccgcgagcgtctccctcgatcagcagcagtcgggcggagttgagtgatgaaggcgggacgcacaatcttcggtggtgattggcgggtacttggctttgccgtcctcgagacaggtaggcaggcactcaatgatctgaccgccgttctgcgacacatcaacaaaatgtcagccccctcaactgctctatcggcacccgttagcgctgtacacaccgggttggaaaagaaagcgatgctctgccttgccggcgtgatgagttccatctcgcccgatccgtcagtctttgcctgcttccgaagcggcggggcgacaacgcggtgaagggtcgatcgcaggacattgttcgaccagcggctgaggaggtcgcctacgttgacgacaatcgtcccggggatcggtgttgccgggtgataaacgcccgtgtgagggtcctggacctcgagcccgccgaccgagtcctgatggagcaacgtcacggtctgacacaagaagtagaggaatggtgagatgccagtcagtaaatatcggctaagagcagagacagaaggagaaacaaacgccgtagtctgagtgtgcgcctgcacgggatccgccgccatcaaggagcttggcggggattgacgggtacgacagtagtcgcaggttgtggaaccgttcgtcgacctgatggggggtccatgtcagctcaggtagacgagcgacgcttgactcttgccggcatccgcacctttcgatcgaaaaagtccacgtcaagcttcaggccgacggcgatcgaccgcatcacctcggcttgcagcttgtcattgtagtcgaagaagcgaagaatctgcggcttgtacgagtcgagctggtcgagtggaggtcagatgccaatgtctctgcctctgaagcgtctggagtacgtacgacacccgccggcggccattcgttcttccacagtggctcgacgtcgcctgggtcgcgctcacggccgacctccatcgactccttgaagtcaggctgcgacaggcgtagcttcgcgatttcatctgcgtcagagaagaagacgtcagtcaggtgatcgtttgcgcccattcgcgaagaggagtgacgcgcctgggtcggctgactgggtgacacgctctcgtccatgagcaacccagcctcggttcgcgcgcgggtctgcgataagggaggctcgtggtcagccgcagtcgtagggttcgggggcgaacgtgatgcacctttccaggcaagcggctccttgacgtcagtcggcagggcgaagaacttagccgactcggcgtacgtcttgtcgatctcgtcttgagggatgccgtggttgcgcaggtactgcgaggcacattcaatcagcaaaaactcgtcagaacagaagcgacaagccgacgaaccatgaagccggcggtgatgagcgcgtcgacgacctggccggctgctgtgtcgcgttcagccctggtcgccgccagccgaaacttgccaaagtcgatgacggggatcttgaaagtcggcgcagtcgaggtcgccagcagccggcgtaggcaggcctgttggcggagtggtctagccacaagcgagttctgaagcagcagcatgacgggaggcgagcgggaggttggggtcgtcgggctgaaggagggctgataaggaatgagctctggctggccatctgctctcagccgctcgacgtcagcgcggtcgggactcacaagcagtagataagagcacctctgcgacgcgcttgcgtagcttgcctctggtcgacgcgaggtaatggtccaatgtagaagcgttcggtcgaagggaggcgagcgactctcttgctgggctgacgcgcagcacctcgccgcctgttcggtcggccttctacgggcgagagcacaaggacggcgacggccgagcctcctatctcgtccggacaaggcagcactagcagcgagaagacgctctgacgtcgatcaggcgagccctgagcgagccgacgtctcgacggcttcggcaataggaaggtccttcgccgagctagtcgttcagctgcgtgagccggcctcctccgttcgacctcaacgtccatcacatccgccggcctccttcctcttgcgtcgtccagatcagcagttcagcatggcggtcagcaaggcacggtcgctcctcttggatgtccatacacacgtctatctccctcgtgcgtgccctgcgcgtgccgagctcgacctcaggcggcgagctggcaagggctgaaccgctctgacctcacgcagggtatgccgagatcatgcggtcgcgcaagacgatccctcgcatcgtcacacgagcgggagccgacggcaagtccgatgaccgactgttgattctcgagaacgagtcggaagcggtcgggggccgacctgtcgggccgcaggtgcgtcaggagatcgccggcagagatggctcgacgagcttcagccgatcctcgactgatcagctggctgcacctcgggccactctcatcagtactgtatgtcgcgctccagtctcttcttgcccctggatgccgctgatcgctcgctacgctcttaataaataggggaccggtcggccaaactcgacttcatgaacctgcacgagattggtgcgcttcgcctacgactgcgcgagcagccgacggacgactgatgcagcaaatcgctcgtggtctggctcgcagatgtctctatcgtctcgacggccaacccctggctcgatttcatgtcgcccgccgaggcggtcaaatcggcgtcggagctgaacgccgacctggacgcgtactgccgcccaccggtcgacgccaaccttccgatcgactcgaagccatcgcggccgacctctttcgagccgctgacgagcaatcgtctttggggactcggcctcctgccgctcgtagagggtgtcgagctgaaaagtgttatcagggcgattgaggatttgaagggcatggaccgcatgaagggcgtcgtgatgggcacgcgcgggctgggcaagggccttgatgacccggtgggacccagtcagggaagtaggccgcttcccgattcgatcctgacgaccatcttctgttttggcaggcgatggaggaggtctggggcgcgctcgactcgcaggatctcgtcaccttcctgtgcgtttgcgtaagactgccaaccggccagagcgccgtgacttttgctgactccgctctgctgctcggctacaggcatccgcactacggtatcggctccgtagagacaaactacgggaaacaggtcgagaacggccacgttttgcagctcgctgccggcttcccgttcgagacgacgatcgccgtcacgcgcttgatcctcgccggcgtctacgaccggcacccggatctgaagctcctgctcgctcactcgggcggcgccctgacacagctgagctcgcgactggccagctgcgtcgagcacgacccgatcgtcagcaggcgcctgaagcacgacccgcgcttctgtgcgtcgtcgctcggtagccgacaatgagcgttggcgtccactgactcgctgttcgccccgcgcagacctcggcaagctctggttcgacgccgtcgcatacgggcctgaggagctcgagtttgtcggcaaggtcgccggccggagcgccgagtacgagggcaagctcggacggtgcaagtcgacaagccgggcggagggcgcggtcaaggagggcatctcgcgaatgatgttcgggtgagtagcgggctccttctttccctccccacgtctccgattagcgttgacaattctcggctgccgccttagcaccgaccacccattctttccgccgctcgacaccgagaaggccgacgcaaggtgggagtcggtcgagcagaatctggacgccatcgagacggccggtggctgggacgctgaagacgtcgcggccgtccgaggtggtaacgctgcacggctcttcaagctggatttgtgacgtggggacgcacgcgcctgctaggccgtcagctattcagaggggagggctgccaatccatcctcgttgtcggctgcaaacggcgtcctccacgaacggcgggtgtctcgtttcttcatctatatccctgcagactctacatgagccccgagaagccagacgagtaggccatcggcctggtgggaggatggacgatcagcgagaggttccaggcaagagacagggtcacgggcagaagactgacctcatgggaggatgcgggctcgagccaaatgcggtgaactcgacttctccagcatcatcgacgcggatgaaggccgccttgttgccggtctggtcgacatagttgggcgccgagaagacggtgacgcacagaccatcgtgctcgacgctgaaaccctcctgccggacctcgtgcgagcggaagacggcggtgactgcgaaggcgagatgtctgaggtcagcgctgcgtagcttcgaggtctggctgccgtggacgaacctccgttggcctcgcaccaccgcttggtgacgtcgggaccgaagccgacgccgacaccgcgcttggacggcccgcggccgggctgctcctgaggatccgtccagaggagctccatcatcaggccgtcgttgccgggctgcttgccgaaacgctgaatcttgcggatgtcttcgagcgtgacctcgtctcgggacgagaggccgccgtggacgacgaggtagcgcttgcggccgttgggcgagagaatcgccggcgtcggcggcgtcaggggcgacagcgaggctttgctccgaggcggcagggccggcgtgacgagcgtgccgagcggcagggcggtgaagacgtcggtgaagagattgtctgcgggcgaaggtggccaggtcagcctgtggttgagctgaataagaagaagagtacggacaggtgacctcgccgtgcttgtgcttcacctctccctcgaagccgtaaacctctgcgaacgcgaccaaaggggacacaacgatcagccggccaaaaggggcaaacacaggggtggcagtgcaacgcactgttcatgtcagacgtctcgtggttgccgcggttgaggaagacgcggttcgggtagagccacttgtaggcaaagagcgtgagcgcgacctcgaccgaccacgagccccggtcgacaaagtcgccgttgaagaggagcaggtgcgtcagcgagggcgggcccgtcaagctgaagagatgcagcaggtcgtagaattggcctgaggaggggcgccggtcccgatcagcatgtcagcggcagagcgtgactggctgagagtgtttggacggaccgtgcgtgtctccgattacgtcaaccgtgcaaccctcctcgactgtgacgtcgaccagactgggctctgcccggaggagggccgagcagccgaggacgatctcccagacgagccggcgcggcagcgtcttaccctgcttgaaccagtcaaccatgccctcgacaaactcgatcgtcggcgtccagctgccggtctcgtcggccggcgcctgcgggcgcgggccagtatagtcggcctcaaccgggcaggcgtggtcggcaataagccgacggcagcgcgcactcgccgactcggtgtcgccgactgaaatggccttctcaaactcgattttgcgcatcagtttgatggtcgccgcgagctggtcgcgcgcggccgtgtttgacggctcgagagagaggaccgcccggaggtcagagatggccggcttcgtgttgaggatcgcgagctgagacagcgcccggcggtagtaggccttgacagcccgggggtcaagctcaatggccttggctgcgaggggtggcgagcaggccgagtcagactagaagcggcaggcggccaagtcggctgtcgtggagacaggaaggacgcactcgcgtccgagacggcgccgccaaactcctccatcttcatcttggacatggcacgatttgagaactgccgcgtgtaagcgttgcgcgtgtcagctctactgcgtcgctgaggaccgttgcgctggcagcgaatcgacgcacgaagatcgggtcgcgggggttgagcgtgatggcatcactgtagagcttggtcgctccgacgtagtccttggctgaaaggcaagcgaacatacaaaggggtcagacatccagagtgcggtgcgctgcgcgaggcggcgacgtaccagcgaacgccttgttcgcctcgcccttgagccggagcgcctcgtcctcgtcctccttcgtgacgagcttgaggtcgtcgatctcttcatcctctccgttgactgaagtcagagaaggaaattgatcaactcggcctcgagagcttcttgccaaagccgaggcagccaggacgcacgcgagaggttggccatgatcttgggcgagttgaacggcgtcgtgtcgcccgagtcctggacgagcgagtgcagagaggggaagtcgctcgagacgagcggccgattcaggccgacgagagagtcgtcggtgttatcgtccgacatggcgggcgaaagagctggtcggcggcgagtgagagggaggcacgcgagctcgagggaggaaggtgttggtcggcgaggtacgcggtcgtggctaagcgcccatgtgcgagagcaaaacaagcaggcccagtcagctcgagatcggcggcgcggcactgtgtatgcaggacagggacggacctggtgctaggactggcgagcgctgagctttgtcgagggagagagtgcaggagggaagctgctcagctcgacgacggccgattcgggggctgcgtctcgtcgactttcttccgcgcccaccgacaaagtggaggtgccccagacacgcgcgcgcggagacggccgacgacgcaacagtcgtcgggaacggcatgggtccgtcgctcccgactcccatcttctccttctcctccccctcctcctcggccagcatcatgatcctgcctgcctttgcgcccgtgctggcgttcgcccagtcactcctctcggcgggcaagcccgagccgttcccgaagcatacgctctacaccctcaacgacggcggcgtcatcccaagcccggcctttggcgtcgggtctgccctctaccagcgcaacgcgacaggcgacgtcgtactcgccttgtcgaatggctaccggtacgtaagcgtctctctctctgcgaggtggcctggctgtgggcgtcgattcagccgacctcgccatgtggctcaccacggacaggatgctgaccgctgctcttcgtcttgcgaccgactttcggccgacacaggcatctcgacaacgcccgcatttatggcaacgaggcgtgcgttatcgtgccctcgcttaacaattgcccgaccggtattgacgacccctctcacctcttcggcgcagctccgtcggcgaggctatccggctctctggcgtcaagcgctccgagctctacatcacgaccaagtatgatgcgatcaacggcgaggacgttcggaccgagttcaccaagagcctgaaggacgtaagtcggcgctccctactgctctcttcgggttacctgctgacggcgacctgcccttttctgcagctcggtgtcgattacgtcggtcagtcgctgtgcctgtcgagattcccgtcccggtcgctgacctgtaagcttctcattctatcgcctgctcagatctctacctgatccactttcccaagttcgcggtcgacggcggcggtatcgccaaggtctgggccgagtttgaggcgctcaaggatgagggcctcgccaagtcggtgcgtcagtgtctcgtctgcgcaagaccggggctgcaggctgactgccctcctccctcgacccgtagatcggtgtctccaactacggcgtcgaagagctgacggagctcttggcgctggccaagattaagccggcggtgaaccaggtgcgcgtagctttaagcaaacacgattcttgcggcgcttactctctctcctcatccgctgccagatccgttgccacgcatacaatgctctgcagatgctgccagtgatcgagctctcaaacgccaatggcattgtcaccgaggcctactcggccctgacgcccctgacgcgcatgccgggcggcaaggccgttcccgttgccgagcgcgtcgcccgccggcttggggtcgagactggtcaggccattcttgactggctcaagactaagggcgtcgtcgccgtcacgtgcgtgtcgttcatcaacactctgtgttctgccatgaaggagttcaggaagtgctgatcgttgacaccttttctctgacaggacgtcgtccaaggacgagcgccagaagcagcagcttgaggtcttccagaatggcttccctgactggacggccaaggagatcatccagttcgagacggccgcaccgggctgggagggcaaggcttgatggggcattgccagccgcgcggagggaggggtgaaagtgctgcagggcaaagagctgccccggcagcggatgctaatgccttgtatctctcacctagtccgtttgctgattaaccgcgatgcgaaagcaaacattgtgccgcgaaaggcaaaacgtacagcagcaacaaaaactgagacccttgcccgggtcgaacggacggccttgagatttggaatctcacgctctaccactgagctaaagggtcgccggcctgaagccgatgcgtgaagtttattgacaaacagtaattatatatagtattaacatctgactcgggcgagcggaacggagagggggacgtagatcttcagtctggcagacgggcagacaggaagtcgccaaggcattggcgggccagccggctctactggagctgaggccggtcagggcgtatcggcgctgcagagacagagcgacggccttgcaccaacaggagacgcgccccgttgtaccgggagtgacgatgacggacaggcagctttcactatccccttatgacaacgcccgctcagaaatgacaccatctagatgtaaaccctgctcagccggaccagcccgagaactgctcgtatgcctcgatctcggccgccgtcagcagcggaaagtcgtcggcgaagggcacgagctgctccttctgcctcgcatccctggccgacgtcctgtggcaaagggttgagaagtggtcgtcagcaacctggcagcattgccccgacagcccttaacaggggagggagacgtacgtgacgacggcaatgcctttcgttcgcagccagttgagggtcgcctggcctggcgtgatctcgagcccggtgtcgcgcgagagtcgacgagcgatcttctctgcgacagcgtcggccggtccgtctgcaggtgccacgacgtcgcgtcagcacgacagtcatgggggctgtagagaagaagccggacgaactgggcatggtcgtgataggtgtcaaagcagagtacgcctggacgacaatgccgtgcttcttgcagagcgcgagagtcgccgcctgctcgtcgacgttgtaggcatgatagcggatctgtgaggcacaatgagagctggatcagcgtccagcctgagacatcgagctgctcagcaacgacgcgcgcacctggttgaccgccggcttatagcgggcatgctcgagcaggccggcgagcaccgtctcgttgaaattggagaccgagatggtccgggtgaggccttcgtcgaggacgtcctcaaactgacgccagatgtcggtcaggttggttgcgagttgcgggaagtgaacgtaaaggccatcgaggtagttcgtcccgagcttctcgagcgatgcctcaatctccttgcggacgttttggccgtgcaagccgtcccatttgcttgagacgtagagagcctctcgagcgatgccgctcgcagcgatcgcgaggccagtcgtctcctcgttcgcgtagaacggcgcatcatcgaccaccctgtagccgttagcaaacgccgacaggacgaggtccgtcacgttctcaaacttgtggacggagccgacgccaaaggcgggcgacgggagcgacgagccgtcgttgagcttgaggagctggtggccaggaaaggccgtctggggacggtcgccgttggccggcggctcggaggtgaagagggtctgccaggccgacagagcgagcgggacgatggccggaacgtcgaacaacatcgccgagggtgagaaggctggtggcggtagtctggtgtggcggtgctcgctcgagagaggccctataaggaacgtcggatggatgttgagggcctcgaggcggcgaggacggagaaggagcttcgcacgggcggcgtcgctcatctccggcaattcgacgcaaacgcagcagacgtcaattcgaaagctttccaacggcacatcgtacaagcggacgtcggaagcatgccaatacaggacaaggcgccaagtaaggaaaggggagcagatgccgtgaagaggaagggggcagaggcgaccgagacgctagtcatcgttcgtgcaaggcgaacgaggaaggatgcggctggcagaggaaggaacaacacggccacaagctgctctatcgcgcctccggacctgatcgaggaacatggtcaggttggtcttcggacgcgtcgagccctcataagactttgggagcgcgggccggtaaggccgacaaggccgacccggcggagcgtcgaccctagacgtgctccccgatgtctgcgataatggccggctgacaagcactgggtctcgcagcgcggcagccgagctgccaaagctacctcgagcgagggtcgtcgtcaggggtagagccgactgacggagggaagtgttggcttggctggcggatggtcctacttagggttactgagcaggcgcgatgacgctgccgcccctgcacaccctcggccatctctctgccctgccgacgtcaacctttctctctgacaactcactcccagcttcgaaatggtcgcacagcccgaccttgtcattgcattctcgcccaagggttcgcccgaggcccgcgttcccaaggccatcgccaaatcccagagctcgcgcgacgaccagcgccgctcggccgtccaggagtaccaggtgcttgtcgagcggctcaaggccaagggcctgttcgtcaccgcccgccgggcgaccgaaggccacggtgccgaggacggaaagatctgggtacttgtccgcgctcccgagcagcttatcgatgagctcaaggtcaaggagaggtgcgtctgcttggggccatgcccgacaaaggctcgcgccgcatgcgccctccgatgtcgagctcgcctcctgacgactgcctgccttcgatttttgcaggtccgaggacttcctccacggcgtcacgacctcgccaacggcgcctggtgccgggaccgacccggcgacccgtctgcggctcgtctacgacctcctgacgagcgcaatcgagcaggttcgtccgactcccgcctgcgtcatgctgcgccggagggtcctcccgcaacagtctaacttcctgtcacccctgacccgtcctaccttccagggcggcattgctatcacccccaactcatacccctgggcgcacgtctcggcaatctttgcactccatgacgacgaggccgacaagcagtggctcgcccagtggacgcagaaggactggaaggttgggctcgaccttgcccactccgatacgacctatctccagcgccaggtccgtcatcctcagctcaaagcttcagctcgcgactgccactgacgcccctgcgctctattgcctcagcacggtcctgccatcgccctctacttcaccttcctgtcaacctacactctctcgctcgtcccgcttgccgccgtgtcgatcgtcgcccacttcctcttgccggcctactcgctcctctacgccctgcccgtctcgttctgggcgctcgcctttgtcgagtactggcgtgcaaaggagtgcgtgctcgcgatcgaggtcggcaccgaaggcatcgagggccggcccaagctccgggccgaaagctcgccgatggcggccgaggaagcttggtggcggcgcagcgcccgggtcgctgctggcgtcccagtccttttactttgcgctgtcttcctcgctgtacgtcagacatctgcccgtttcgctcccgccgtccgcgctcattcgttcacgcccgtctctccatcagggtgttctctcgctgcttttcatcggcgaggccttcatcgtcaacctctactccggtccgggacagaagtacattgtgagttaagatgcaaagcgcgtctccacagagtgcgccggcgctgactcggcgcctcttgaatgcagggcctcctcccgaccgtctgcttctcggccatcgtgcctcagatcctcaaggtctaccgcaacattgccgagcgcctgaccgcctttgaggaccacgcctcgacccgggcccacgccgacgcgctcacgcgcaagacgtttgcgctcaactcgatcgtcgcctacgccggcctcacgctcagcgcctttgtttacatcccctttggccggggtatcatgaccggtgtcgaccagaaggtctacaagcgtgcgacgggacccgacgccgccgagcacaagatctcccaggctgcgaccgagaaggtcggcaaagctgccaaggcccgcggcgcgatcaacaagggccggctccaggaccaggtgcgttggtcgtcctctccctgccatgttcttgtagctgacgatccatctcgaactctgcagctgtttgcctacaccgtcaccaaccaggtcatcaacgccttccttgagctcggcctacccgtcatcatgcgcaaggtggccgagtaccgcggccagacctcgaacggcggtcctgcgacgctcacgaagaagacgaccgctgacggccctaccaagtcgacctcggccagcatcccgtcggcgtcggtccacctcgggcgcgagattggaggtagttccgggccggtcgacctctcgcccagtgatacaggcgagaagacggctcgggttgaggtcagcgaggaggagcgcaagctgctcgccaagattgagaaggaggccgagctgccggtgtacgacctcttcagtgcgtccaccttgcggcccatgtcgacgaccgaacttcagttgctgaccacatcttccgcccgcccgcagccgactacgccgagatggtcactcagttcggctacgtcgccctctggagcatctgctggcctctcggtgcccgtgcgtccttgcccggtcggtcccagatcagtgctgcaactgactcatctacttgcattatagtctcctcgctcgtcaacaactacttcgagatccgcggcgacgccttcaagatgacgcacaacgtccagcggccgatcccggcccgggtcgcatcaatcgggccctggctcgacgccctcagcacgctcgcccagctctcagccgtcacggtgacgacgcttcacctcctgttccacccgcaccacctccgcttccacttcgtcccctcgggtgccgagcgcttcctttcgccgtcgtaccacccagacgccgacgcgggcacctcggtctccgagacggtcttcccactcctgctcgtcggcctcgccgcgagccaggtctccaacctcgtccagcgcgggctcgcctacgcgatgcagaagacggtctgggagggctcggagcagcaccacgtctcggtccagaagacgctctcggtccgccgggcacacctcgacgagcagcaggagaaggtcggcgttgttgccgagcgccagcaggaccggcgcgagacgagcgactcgttctgggccgagctcggcgttgacgccaacgagatcgctcagggcttcaagcaggagtagctgccgccaatctccgacgtcctcccgaatgtcgccgttcgacgatcagacccctgccctttctttcttccccgacctttcccgcttgccttgtcaaaagagtccgtcgcctctgcggccaactcgctccgctcatacacgcccgcccttcagaacactgtatcgaagtactcctcgaactcgatggcaagcagagagcagcctgggcgttctggaagcgtcggcagggcaatgcctggctgccatggcgacgggcggccgccgcgttcacgtgccggctcggctgcccagcgtcggccggatcctcctccgcccacacccaggcgacctttaccccctccctctctctccgaaactgacgggatgacgcgccggcagcttagcaggcgaggcgggccgtcctcaaagcgagcctggaaggagagggcgccctcttctccacctgccacctcgcccgctcgcccatcgtcgtcctagctgccctccgcctcctcctttcgaagatgctcctcttccaactcgcctcgcttctcgccctcatcttcagcggcgcccttgcccagctgcagatcaacacgcccgtgcgtctcgggcaggtcgtgcttgtgctcggccgtgcctccgtcgagctgaccctacctggtgcgctccgtctcccctcttcgcccagacgacggccctcagcacctgcgttaacaagcgcatccagtggagcggcggccagccgccctacaccgtccgcgtctttcccggcggccagctcgacgctgacccgctcgcagtcattgcgctaaacacgggcgacaccaacgccgtctggcgctgcacggtcgaggccggccggtcggtcacgtttgccgtcgaggacgacaacggcgacgtcaatggctcggcccaggtcgtcgtcacggagaagtacgtctagaatggcccttctcaatctctgtcctcgccatttacactcgctgacgcccacctcatcgacctgcagcccctcgggcgacaacagctgcttgacgggcaacggtcagtcgtcgacgacgacgacgaccgccgctgatgccacctcgatcgcctcggacgcgtcgccatcgacctcgtcgtcggacgaagaggcatcggactctacttcgttgacctcggcctcgacgacggcgtcccgcacccagatgacgtcggccacctcggtacgtcactttgccattcccacgctgcacccccttgtctgccctcccgccggtagctaacctgctctatgacctgcaggcctcgcgcacttcaacctcttcctcgccgtcggccgacaacgccgccgagaccggctccgaagcagccccgtgagtctgctgctggccggtccagcctttgactctgctgacttcggccctcctcgctcctccccttcaggccccagtcagcggccctccgcaaggtgctcgtcgacgtcggcgctctcgtcggctccctcttcctcgccgccgccgtcgccttctgagcagactcgttcttcccacggttggcaagccgctcgtcttcgactacttctcgctcgctctctccgcttcgcgcttggcatcgtccgatcgccagcctccgtctcgaatcttacatagccgctctgcttctctgaacctcgaccgaccgacgagatctcccccgtgtctgcatgccgcccgttttctcttttcgtctttcgcccgctcgctccagtcgctcgcatctgtcgccgcgtgggccggaagcagtgcgcagaccggccgccttcacatcctggaaacgcctttttgaaccatgtctgcttggctatcgttccagccacgcggcggagcgggggcaatcgcagcccgaggcaacagcctcgtgcgccggacgtggcctgcccccctgtctatcgcacttctacgacgacgaacgagtgcgtccagctgattcctggaggttgcctgcacgtcgctgagcctatcaggtcggaaagatgagtcgtcgtcgtcgtaaggagtcgtcaagtcactcgtccggagctccgcgccggctcgcgagctgagggcgcgcagctcaaccaccgcctcttttgcctgttcgctcgttcggcagggcttgttcgctcgacaggtgttcaccaaataagcggcggcggcagctcactctcccagctctcttgacataacgcaggtgttcaagctggcgagggtgaggccggattctgcacatgcttcgtcggattcgaaaactcgatcagtgcgacagttccgcaggcattttacatccgcaccgccgccccgcctcctcaagtctcgaccacccggaagcgccgcgagctcgccgcacgcaagaggagaaggccgccgagaaagatcagtcgttctgccagggcgctctgacggcctgcaggatcgagggctcggccgacgcttacgaggtgagccgcgccggccttaccaatcgcttccgaggaacggagctgaccctcgctcttctgcctgaccccttgtgagatcggcagtgcatcgatacgctgaccgagctcgtgtcgtgcggtggctgccggcacggcgtcttcacggccgacggcagcctggctgctctcgacctgcctgcccacgtccagcgccgccagcaaggtcgccggagcctcgcccgccagccctccagcctcggtcggcattgagtgagtttccctccacaatcggccgtccgtcagccatggagtgcaacggctgacgcccgttgttggccgccagctgcttcgaccgccagcacttcggccctggcctgacgtgccgcaagggcgcctgcgcctcgatgtaggcaagcgagcgtgcccccgtcagccttcgtcagccctggtcggccctcgtcccccttcgtctgcccacgtcagccttcccccttccccttccccttcgcccttcctctcgcccccctcttccctttcccttctgcgacgcagcacgtcgtccttctgctttgggcgggttgacgaggagaggctgtagaagtgggatgggtaggctgctgttcgagtgccgccgccggtgctgatcgagccgggaaggtcggtcgctgccgctgctgctgctgatggaggcgatggcgcgttggattgggacgaagggagtgcgagctctttgctgacggggcagacaaagaccgaatggtgccggtcggccggctcaagcgggatctcgacctgtcaccgcgcgtgagagggagagagcgagaaagcggcgtcagcatggcaaggggcggcggctatccattggtcgtccggggttgagagagacgaaccggcagctctctctcggtcggcccaggtgccgtcgtcgtcccgcccgctccgccgctgcctcctctccctccaccgaccccagccgctccatcctcttccgcagcggcaccaaccccaacgccccccatcgccagcaccgctcgcgccttctcgaccctcgcgacgccgccgtcgagccctgcccggagcgcgcggtcgagcgccggcgtctgggcgaggctgaaggcgcttgcaaagacgcggcggacgaggggctcgagcgaggggccgaaggaagccggcgaggcgtgcaggtcggcgtagggcagcagcagcatgccgtccgaggcggaagcggaggcggcggcggcggtcgattgaggaggacggaagacgagcgcgccgagcagccggtggatctcggttcggtagcggtaaatgggctcgccgcctgcgcccacgggcccgacgtacccctcgccggcggtgtcggcgctgtagaaggcggtgaggtgcgcgcgcgcataggcgagcgcccgcgcctggccggttgaagaccctccgccgccgccgccgccgccgctgccgccgccgctgcctgcaggcccggcggttggcgggaacggctctccgccggcaagaagcgtcaagaaggccgtcttgtggagtgcaaagcgcaggtcggccgtccccgctccagctggcaggccgctcgtcgtccattcgagcgcggggccaaggtcgccggagtggagcgagtggacgacggcttcgaggcgctcgacgtgcgcgaggaggggaggaagctcgagtggtgctggtggaggaggagggcgatggcggacgacaggctcgctagcgtcgtccattgggacgtcaggctcaaactcgcctcgagcgacggcggtagcggtgctagttgctgcctcgcgcgcgaagctctcgagcgtcgagcgctggccgaggcggacgagcgcgtgcgcgaccgcccggtcaagcgccgcctgatcggccggcgaggtgaagcgctctggcgaaagcgacggcgggtgatgcgagacggtctggatcaggggcgcgcgacggggatgggcgaagaggtgcgagctcagctagggcgggcgcggagcgggagagatggggcgggacgaagagaggagccgcaccttgtcgatcgccgagccgagcttggtgatggctttgtggtagcccttgagcagctggagtgcgccgaagaagcgagcaagtcagcgctcgaaccctacgggtcaaggcaaggcagaacggacgtcgtcgatctcgcgcttggcctggtcgaggtcgtgccttagggcgctcgccggccgggccgggttgtgcaaggcagccgtcagccggtcgagggccggttgaggcgagcgggacgactcgactgcctggagcgggccgtagagggcgtccatcttgatgagtaagggtgagggagcgagcgagagcgagagagagggatagcacgcgggtgacgactgcgcgcccgcccgccccggaatgggaatccgccggactcccagcccgccctgtctgcctgcccgccctcgggcctcctcctggccggctcgcatctgcagcacgcccggcccaactcgcaccagcaagacaggacatcgagacgagccccttattgcgtcgccaaagagatgagcagccactcgaccggcccgatcgacccttcgctccttccgcagcacgacgccgtccaccaggcctttgccgcttacgtcgctcagccgccgagcccgccagggacgaccgctggcggtccgagcggcagcagcggccgagcgaccggcagcggcggcggccatcagcgctcgctctcgcctcgaccagcacaccatcacggcgtcggcggcggccagggctcgtcgaatcgctcggctgtcggccaacatgcaggaggcggcggcggaggagggggactgtacgaccacctcggctcggtcgtcgacgacggctcatcagtcgtcgacgtcgttggcctccaatcgctctcggacgccggcttccatctcggcggcggcggcggcgcgggtccgtcgacgagggcaggccagacgggcggtgactttggccatcagcagcatcagcagggtcagcaccgtcacatgcatcgcggccagagcgcctaccacccgaccggccaggcgtacggcggcggcggcggcggcagaagccaagccggcgggaccgacgacggccactcgacaaaggacggcggcggtggcggtgccgacggctctgaccggcagacgaccgacggcggcggccggggaggcaagaagcgcaagcgggcgcccaacggccaaggcgtccggacgattgcccgccgccaggccgaggaaggcgcgagctacatccactcggccgccggccgggcgacggccttcaagaatgggatcgcgacgattgagcacaacgtgcgtttttcgctcgccctgcctgccccctttttctcgcacggcgcgtgggcttccttgcgcgatcgaaaggggggctgacgccgaggtttgagaaaacagatgcgcctactcgagacaaagacgggcgctatgatcttttacatcgctgcgctgttcgttctccctcctcttcgtctcatcgaccgacttcatgccagcttgctcacacccttgcgtctccgcttacctctcgccaggcccgacgagccgccgcatgcgtcagcctcgccccagcagtggatctcgcacacgtcgcccgcgcttctcgcgccggtcccggccgacttctacgtgacgccgtcgggcgagccgctgtttcccggcgagctcgacccgatccagccggcggaggcggccgcccaggcccatcagacgctcgcagaggcgatcgcggcgctccagcagcggtggagggcgcacaacccgggtgagccagagaggaagaagggaaggccaaacggcgggaatcatcatggctcggcggcggacgatgatggaggtggtggcggcggtggagcaggcgctggccctgactcgcaggtcgacgacggccagcagcaacagcagcactcgggccacggctttcaacagcagcatcactcgacccatcccttccagcagcatcacctcgcccatcagcaacagcagcaccagcaccagcaccagcagcatgcggcgctctcggcccacgcgctcgagcagcagcagcagcagcaagcggccaatgacgccggcgagcagtacctcaaccatcacgacatgacggacggcgccggagtcggtgttggcggtggcgtcggcggttcgcacgacctgcctggcacggcgggcccggccggcggctcaccagactcggccgcggcggccgtggcggcggtcgttgcgcagcaggagctcgagcagcaccttcagcagttttcgcagagccaccaacagcagcagcagcagcagcaggcgggcggagggagccattcgtacgattcggcacaccacctccagcctgcgctcggccctgacgtaggttctggcgcttcagtcagcggcggcggttcggccctggccccgacgacgaccgcagcagcggcagcggccgaggcggcgcaggcagcggcggacgagcgtgcgctcgacgaggcgctcctccttgggacagcgggcgacggtgcctttgtcggcgcgctcgatatggcgggcccctcgtcgtccgcggcagtcgcagcgggctcgacggcgggcgacgcggacagcagcagcgccgctggccgcacggcggcggcggcctcctcctcgagccggatcggagccgacatcgcccccgactttgccgcccagcttgtcgcgctcgagcgggcgcgcgcagaggtcgacgcctcgcgcgaggccttcctccgcgagaaggcgagttgggacgcgggtcgcgcagcggtggccgaaggcggcggaccggcgggggcgggggcggcgcaggtcaggttagacaaggacacggagccggcgacgcgtcgtgctacccaggcagacgacgacgatgacgacgacggcatgctcgttctcgatgatggcgacgacggtctcccggacgcggccgccgacgaggacgaatacgtgatgaagctcgagtagctttgccctgcccctactttgtacttgtctcttgatctttccgttacttctcacatgacacgcatgccccttcttcttgccttgacttggtcggaagacagggtgatgggttagagcagcggcagcagtagcggccgggccggcgtatcgttcgctcggagacggacgcgccggcgcctctgccggtcggcggtcgcttcagcccgtccgacgagggcagcagccgaccatgacctcctctcggatggacccctcgctcgccctcatctcaaagacgcaccgccggccgatcctcatgccctcgtcctcgttcggaacgctcgcctcgtcgggttcgatgagtccgccagcgacgccgagccgggtggcgagcagcggtcggagaagggcgacgacggcgggggcggcggcaggcgtcgagccgactgccggcgacccctctccctcctcgtcctcgagacccccatcgcccaggacgtcaactggtccaatgccgctagcagcagacgacgagaaacgccgaccgccgacgcagtcaaagacgctcgacaaaaagggcaagggccgcgaggtcctcagctgggccgagggcttcgaccgcgcgctcgacacgatgggcggccgggacgcgtcgatgaaggtcgtccagtgcgtccctatttcctcttctttcaaacaattggagacaagaccgctgagcaattcattatcctcctttcaggtacctgattcgcaccttcgtctacgtagctcgccttcgcggtgcgcggcggggcggcttccgaagcgcgagcactcccggccggctcgaccagctcaaggcgatccagagcaatctgtcgtttactcggtccgtccatccgcccgctgcacatcgtctcctagaccggacgtgcttactgagtccccttctctccgcttggcagacgagccttcttcttttgctccttcctcggcccgtcgctcaagctcgcccggccgccaaagtcgctcgcgtcgatcgtccccgacatcctcgacgtctggtcgtcgctcgccgacgacatctggacgctccacaagctcggcttcgtcggtcgcaggatcgccatcccagcagctgaatgggcagagtgcgcgcttctattatatctccattgacggcgtcgcgccggcccggctgaccgtttctctccgcgtgctttaatcctcccttctctcgtccgccctaaaccctcgtcgctcagtcggctctggctctacgcgatcgtcgtcggtctatcgcgcctctcggtctcgaccccggcgctcgcgcagaagattgacgccctcgaggcggaggcggcgacgctcgagggcgtcgaggcggaggcggcctggcaagcggccgtcgtcgcgaggcggaagcggtcggtcgaggtctggaaagctgtgtgcgtcgtctgctgccggtcaaccatccatcctcgctctttcggctgatcttctgtttctcgcttgctgctctcgtaggaaatactggctcgacatgctcttcgtctgtgagtaccgctcgcccgcgtccaccgcgtggaacaggagctgactgatgccgccttacctgcagcgtacgatgtcttccgcctcagcaagtacaaggacactgttcagatgctcgccggtctctgcgcgtccttcatcaggttcgtctcgtcctccgatgcgccgcagagacgtctctggctgacccattgcggccccgctcctcgtagcgtgcgcaatcacgttgagacgcagcgcatcaaggcgcttggctgagcgcgtgcgtacttggcaactgtatcaagagtcatgagatgtcgtttgaagattcgtagtccgtcttaggcgccattggagccccatccgtcgccgccgccactgccgctcctatgctcgtacgctgatcgactgcgcccaccgccttcgctgtcggtctcgaagccgttgccagaggtgggtaggccgtccttctggtgcgatggccggcggtcggcgtcgctccctcggccatcttctggccgaaggctttcgggcgaggcgattgggtagagtggcggggacggcccgctcggaggggtcgccaggcgccggctctcaaactcgcggattgacgagatggaaggcgagcgggccgagcgctgagcgtttgagatgcaaaagagtcagcctcttaagggatctcaggcatcagcgcctcagcagaggaagaggcactcactcggacgacgtctgcgatgcgccgctccgactgggggtcggtcgtgccaatgctgtcggcaaccgacgtgttgcgcggaaggccgaacgccatctcctcgtcctcgtcaatgtcgtcaaagaacctggtcggggggagggggggatcgtcagtttgctcctcccaacatggagcggcgccagatgagacgcactggttgaggctgtggaggtcgccgacgagttcaccgagcgtgagctcctcggtcgcgtgcgagggagcgagcgagtcgccgagcgagatctgcgagccgttttggaagaagccggccgtctcttggaactgcatcgaaaagtgggccgacgactggatccgggcgccgtggggacacgtctcgtagacggcgagcgcattttgccgggccgaggccgacttttcggccgctttggcgacacaccagccgctctcgagcggcgtcccaaagacctcgcccgaggacgaggcgaggttgtgcatgacggcgccaaacgtcatactcatgcggaggacatgcgccgcctcgagtccgttggcgacgctgagcggctccgagaggacctcgagcgcctgcggagcgagcttgccgcggacgagccggagcaggggcatcagcaactcggcgccgtagatggcgagcggctcgcgcgcatcgggcgactggacgacgagctttagcagcaggagtgtcttttcgcgcataaagtcgcggctgttgaggacaaaaccgagcaggagagtgacgacctcgaacgcctgctgcgggagaaagtactcgcgaattgacgagacggccccgcggaggaaatcgtccttggtccggaagcggttcttggcaaacgacagcatcaggcgctggattcccgacttgccctccgaggcggcgatcgcactcagattctcggcgagcgcgacgatctcgggcccaaagtcgtcgtcgtccatcgcgacgaggcaccacggcaggctcgcgacaaagaggtgcatcgtcctatcctctgcgatgggttgaacgtcctgagcgtcagcatctcggccgggagaaatagtctggagagtaacgcacctgggacgtcgatcaggacgctgctcttgaccgcggcgagccggcagacgaggtcaaacgtcgcctggtcggtgacggacgatcggagaccgggcagcaggagcacctggagccggaggtcgtcgtcggaccagctcggcggctggttctcgagcagaatctcgacgacgtctgggttgtcgaggtcgagccggtcgaggatgagcgtcaggaggtcgatcgcgatcgcaaattcctcctcaaccgtcgtcgagagacaggcggcggccgtccagaagagctgggggaaggcgagcaggttttcgccctccatcgagcggacgatcgagcaaaagccccaaaggagctcctggcaaaaggcattgttgccggcggtcgagtcggcgagcgtattggagagccggccgatcatgtcggcgagcatccgcggcgtcacctcgggactgagcacgcggaagagctggaacgagcggcacgcgagctgccggtcagggcaagacgtgccccagtcgacggcgagcgcgccccactcgtgccttatgtccgggtagaagggctcgagaatctcgagcacggccggcacgaggacggtcatccggcgtggaatgttgagctcgtcggtcggctggctgtcttggttccagaaaagctcctgccgaccgctccagagggcgccaatgtcgagcttgacccagctccagtcctcggcctcgacagcggcctcgtggttggcggtcgccgtccagaggagctggaacaggagtgcctgcgcctgctcccggatcggtgcgtacaggtggtcgacctgcgtgagcgtcgcatggagcagtgtcgtcagatgaacgcccgggtccgggcagctcgctgcgtccgtcatgacttcgccgacaaagaggagggcgagccggccgattgacagcgcttgcgacttggcgtgctgcggaaacagcgtgtcgaggtcgcgagcgaaggccgactcggccgtcctcccctctgccgaagtcggccggtcgtcgacgtcgggcgcctgaaccatggcagccgggtcgataaaggagcacaggtcggggaagatggacggcccgacgggcgaggccgcgagcgaggcaacaatgttgcaggcgtggccgacaaattcggcgctgctccgcctgcttgcctgctggaggaggaacttgacgatctcgctgcagttgcccgcgaacgggccgcacgcgaggctgatccaggcgagctgaagctcctgcgggtgctcccggccaaagctgacggcgacaaaaagcaggtcggcgagcgcaacccgttgcgcagccgacgcgctgcaatcgacctgggcgaggaacggcggcagcaggcggagcaggctgagctcgcggccggctttgatctgcgtcagccgcagcgtgagctccgagaggacctcgacggcatcgtccggctggaggctggcgagcttgtcggcaatgtcgtactgcgcccgaaggtagacggccggcgcgacgctcccgaccggcggatatgatcggacaaaaaaggtcgagtcgggcaggacgctggcggagagaaggtcgagcgccctccggcggatgccaacctccgggtgagcgagcttggcgaggacgagggctacccgctgggcataagagacgtctagcggcgcattgccaagaagcgacgagacgaggacggcaaagaacgaccggccgagaccaaagtggtcgccctcgctcgacgtctgccgcagaacctcccggatgaaggctgggtcgcggccgttgtgctggagcagcgatgacagcgccttcctgcgaaagccccgcagagcggccatgtgttgtgtggtcagtcatccgggcgaaagtgagtcgaaaaacaaggatgagagacggaccggccgacttgatgcgaggccgggctgctcgtgacaaagagcgagcggacccaagccaagatgccgtctgcttcgacggctcgactcgctggcgtcgacgatgagttagcgtcggcgctgacggtgaagaacgggccgcgctgcaatggagaagcaaccagcttcagcattgggttcgagcgatcatgggcgaggcggcgacgcacgcagagggcggccatggcgtccgccgcggcgaccgacaggtgcttggcgtggttcgagaccgaggcaatgacggcgcttcggtcgcggctattgaaaagcgagtcgtcaatgctgttgagaagcttggactcgcgggcctgggcgacctcggctcgccggccaaggttactccactgatcgcattgcttgaagatggccgctcggaggtcacggccaaggtgccggtctgggtcgccgacgatggcgacgccgtctgcgaggttctgaacgacgatgcaaaagtagcgccggagcgggtgcagatgcgggttgtctgcccgctccgagaggtagcgcagcgtccggtcgacgaactggatgacggcgctcatcagcttgaggtcgccgagcgagcgcgtgtccttgatgaggggcgagatgcgctcaaagacgtgcgcggccgccgtgtacaggtcggtgatctcgggctgcggcggccgagtctgggtcggcgtcgccggcttgcttgtccgcgtcggcggcatttgggccgagtcgtagatgtggctcataagccgctggagtgtgtcgagcaagtcgttgagggtcggctgggcaatatggccgagggcggtgacggcagcgtcgcggaagagcgcattctccgagtagagaaaatggatgatctgctgaaagaggtgcttggacgacgagagtcgctcagcctcgacgtcgatgatctgggacgaggcgcgggccgagacggccgagctgtcgcccgtcggcgtcgtcgtcgcgcacaagacggtgacgaggatccgccactgctccgacagcaggtgctcggtcgaggtccgggccgagtgcgtcatggccgaccgggcggcgggcccactcgccgccctgcgtgccgtctcgatgatgtttgatttccagtcgaggaagacgcggccgacgagcgagcggaagcggcgcatcgtgtcgggcgcgcgcagctggagccgctgaacgacctgcgggtagcagaggtaccagagatgctcgtcaagcgggctgccgctctcggcccactggaggataaagtcagtcgggacaggccgcgtgaacgcctcgagccgggcgatctctgtcaccgatagggcggccgcggggacgagggtcgctggctcaatgctccggcctgcagtctcgaggaaagagatggcccgctccggagggtcgtctgtcggcgccgaaccgtcctgaatgaggccgagcttctggagggcgacgacggccagcttgcggaccggaaccgagaccgaggcgaggaagaacagagcggttgagtcgagctcggcgagcgcatcctcgctgatcggcggccggtcggcctcggacacgcgctggacctctgcgagccagacgtcgaggacatcgacccaggtttggacgagccgcaggacctcgacctcgtacgcccggacgccgacatggcgcgctcggttgaccgacttgttgcccgttaggaagcgcgcaaagccggcggcgactgcctcgcctcgacctggttcctgagcgacgcgcttgagcgtcgccgttgccgcggccgtcacgcccgggtcgacatgggcgatgccgcgcgagatgatctgaagcgtcttgccgataccgatcgacgaccggatgaggcgcggccaggcgtcaaggacggcgcggagcagcaagattggcgggcgatgatctgaccggatgcggcagcgaagcaaggcgtggtcgacggcgtaaaagccggcctcgagtgcatcggccggccggacgttgcgcgacagactaatgccgtcgtcaaagagcgtgagcggaccgacgctgcggtcagccagcaaggcgatcgttgacaggatcgggttcagccgttggacgaggtccgagacgcctggtttcgtgaggacagcctcgggcagggcctcacccgacgaaggatagtcgtcgccaaacgtgacgctgccgaaagccgacgccgtcgggaagctcggcgttttgatgtcgtgctcgagcgcgtacagcgtaaggaggacggcgcggatggcgacggtaaagcgctcgggcgtgccgagctcctcgctgccggcgctgatgctgccttgggccttctcgccgagccggtcctcggccagcagctggaggaccaggtcgcggccatagtcaaactgcttaaggaggatcaggtggaggatgccggcaaagacgtcgagcccaacgtcggacggctggaggaagcgctgccggggcggaaacatggcgtgcacgatcgtgtcgagcgccttggcgacagaggaactgctctcttcggtgcagcggttcaggtagacccacagtagacggaggatggcgttggcgacgatcggccgggcgtgtggccgttccttctcctgctcgggcggttcaagtcggtcagcgtccaaagtgccaaggaggggccggcgccggccagcagctgacgcaccctgagcctgacaaaaccagaggtgatgaggtcgagccagtgttcgcggaagacctcgcggggcgagacgcagagcgcgacggccgcgagcgggaaaccgacgtgccagtacttgtccttgagcattttttgcgcctgaaggtagatcgtggcgaccgccttggcccactgagggtggttgacctcggccgttgccgtctgtgagagcaaggccggaggtcagcaaccaacacgcgagttcaacgccttggctggaggacggacgttggcgatcggatggatgattctgtggatcgtctctgcgtaggctgtcttgagcgtcgagccatgcgtctgggcgaagaagccagcaatttcattgagaaagtcggcacacatctcgaacgccgttgccgggtagacctgcagaggagggcgaatgtcagggagcagctcgagagggaggcatgaatgaggggactgaccctaagctggatcgtatccatcgcgcgcacgaccgtctcgagccggccctcggcttcgcggtcggctttggacgcggtcgtgccggtcgtattgagcccgagcttgaccccacgctcgagctcggtcaggaaccggtccgtcaccgtctcaaagctgagtagaagacattagctgggtgtcatcagtcgggcggcgcggaggtcgtagacgtaccgaagggcggaaagcttgccgatgacttcgagaagcagccgtcgatttgcgagcttattctctgaccgccggatgttgtccctgcaagacccggggtggatcgtttaaggcccgttacgctcagagagtcgcgaagggtgggacgcacatgctactctctttgacgacgtagcgccaaagcatatcctccatcttgagaccgaaagcctcaccgaggacctcctttgatggcgtgtgtttgacaatcgacagcgttacacgaagcagcaggtagagggtcgagacctgggagttggaggcaacgacgatcagtgacgtggcgcccacagtgagctggccttgtgacgcaccgcgcggcggtcttttagccgacgctcgacatcggcgacgctcgcgtttggcaggccggcgaggtggctccggacggtgcccttctcaatctcctcctcgagcagctcattgcgccacttgacgaggttgtcgacgacaaacttggcgtcgcccggtccggccccggcaagtgcacccccgccaccgccacgctggccggcgaagctcggcccggatggcggcttaggcccggcactgccgccaccgagggcggccgccatgccgagactgtcaagcacgcggtcgagatcctcgtcggcgccgggtccgattagcttggaaaagatgggctcgccccggcggagcgggtagtcgttggccgagagcgtccactgaatgtgcgacgttgtgatctcctggaagagctggaggaggaggtgaattgcaaactggggcggggtcgagggcggcgggaggctcatctggctggcgagggcggccgatgactggccgagcgagttggaggccgacgacaggccatgagcatgcgtccggcggccggtcggtagcggaggcggcggcgacgagatgctcgagttggagccgaacgcgaaggtcgacgacgccgtcgagtagttggccgggccagagtggtgcgtcaaggccggctggcgctgcgacgacgccgacggctggccggtaccgacgccactccagaaagcagaggccgacgatgggcccgctgcaccctgggcggttgacggtcgccgactgcgcgcccgggcggccggcgccgcaaacgacgtcggaggggtcgacgacgagccggcctgggtggccgaggccgagcgcgagaaggggttccgcaatgctgggtaggcctggacggcgtccggtaagggcgggacagccggtgtcttgccagagaccttgtcggcgccggccgctttgctgaaggctgacttgaggctcacaaagctccccttcttctggacctgcttcggcatcgcgcccgccgagcccgccgtgtcgcgccgctgctggccaaatgcagacggcccatcgccattgaagctgtactgcgaagccgctatcgagtctttgcgaccgctgccgaagcccatccaggccggcatctcgccgctcgtgctcgaggcggcgacggagtccttgcggccgccgccgctggcgtaggcagcgcctgggtaggcctccgacgaagccgtcgacaggccccgcgagtgaccgccggcactgcctccaccgccagctccgccgccgtactgttgagcatgccagccagtcgggaccgactcggtcgagtgcgacgctgggaggctggtccctccgccgccgagggggtgcgcgccgaggctcgacgccttggccggatggccgaagcgcggggccggatacgaaaacagctcgtcgtccgagtcgttgccgtcgtccagcgacgggagtgaaatttggaacgcgccctcagccgacatttgagcgattgatggccgacggcgggcggtcgggagacaacagagagggttgaccgaccaggggcgcgctgcgctcgagagatgggggggggagcaggtcggctaccgtcggccgcctgttgtcgccagctcggtcagcgggtagcgtatgctgcaagcgagctaagacgtcgagagcagcctgtgctcgggcgtgacagggcgagccgagacagggaagcgggagaatcgagtgctggacgttcgtggggctgaacgaaggcaagccgaaacgacgacgatcctctcccgtcagacagccatcttcgccctcgacccgaccctccttccaccaaagcaagcaccatgtcgacagcccacggcgggccgagctcatcacccgaggcgtcctcgagtaggctcccctcgcgcgcaggtgctggagacaagggcaaagcgaaggaggagtcgccctcgctcagcatgtcggctggcgtcggcgccgacggcggaggaggaggcaagaagccggcgtcgaagaagaacaagcatccgaaggggacgggcccgggcaagggctggcgagccggcaggggcggagggtcgacaggcaagcggacgaggaagaaggtgcgctctcgcaactcccccaaggagacgtgatgggacctcggctgatcttgttgaccgctcgctcgccgtcatcgtcgccagcccgaggccgacgagccgccgaacaagtacagagacaagtgcgacgccagccgcttacggagggaggtaaggatgctgctgctgacgtctgtgctcgtctctcgcgcaggttcgtcacgcttcgggacgagttcgagctcgcgacgacggtgcgttcgagacgtcgcttctggtcgttcggagcgcaagtgactgagtcgtgttccatctgtccatactcgctcgcagaccaaagaagcaagggcggccgagctcgaagcaacgctcgacacgctgaatcggatacaggaggagaacgagtgcgctcgcccctcaaagtcggcccgaccaagtgcgtactgaaccctgtccccctgccttcgccagcttcctgctcgacgccgcccgccgctcgctcgacgagcgcccacacctcgccctcttccttgaaaggacgacctcgcctgcgcgcgagatgccgccgctcccggccgccgccgctgctgctgctgctgccggcgagccgcagaccgagacgcgcattgcaggcccgatcccggcctcagggcacgagccggtctgtcccttctcactgctcttctcttctttaaccgacgcgtgcgagcgtgcgcgcgaggggcgagcgttggcggactgactcttctcttgctcgttcgactgccgagcaggtcgagggcgccgtcgggccagatgacctccatcgacgctccaagcgacagcggctcggctgaggggcgacaccctcgtttctctgacccatctcgcatgcccctctctcctgttacggaccgtctgcgcgctccaaagggggtgatatcgagggtggcatcaaagaacctcagccagaggcccctctcagtgcttgctcttcttgcgcttcttgcccgacgcatccgccccacccgccgccgccgccgagcccttgccctcgcgcttgccctcgcgcttggcgatgacgcggagcagcgccgtctttgtctcgccgtccttgaaggtacccaggttgtagtactgcggggcgaggtcgagcagccactctggccggatctcggtgacggtccggatgaactgccgggagcgcgcaacagagccgggttcagcctccagcagcgaagagagagagaaagagagagaatggacgcacgttggacgttgtcaagacaaactcgttgaagcagacccactctggcgtcgtctccattccgctccccttgtggatccggacgacctggttgtccttgatcgtcatatagtcgcccttcccaccctccttgtgggcgacctgcataaagaaaccggccgtgagcgcctttcggatgttgacgtagtagctcttgtcttcgaacggcgtcgagacgaggtcgaggtcgtgcttctccatcgaccgccggagctgcgagcggacattgtcggcctgctggagggcgcgctgcgagaggaagttgttgtacgcccagttgcgctcatgctcgtctgcccgggccacgatgaggagaaggcgcgtcagtctagcgctgcacaagccgggcgccagcgggcgagtgagaggggaacgtactgctcttgtaagcgtggtagacgttgaggagcgtcagatggtcgccgtccgggtggacaaactgggccttggccatgtcggcctccttgcgggcgttctgcggccgcaggaagacgttggggactgaagggcgggcaagggcgggggattgcgaggtgggtcagcaagccagcaacagaggacgacgacgacgacgcgcagcggaacgagaaggacgcacccgagagcatagcgacaagcgtgaggacctcgttgctgcaccggagctcggggctgacgataagcatctttgcgagctgcaaggagacaagccaaacaagggggtgtcagtatggcaggatgaggggatgggagcgggcggaagcagggtaaggacgagtgcaggggaggagaaggaggacccaagacggacctgcgggtcgagcggaaactcggccatgacagccccgagcggcgtcatgtcgccctcgtcgtcgagcgcgccgatatagttgaggagctcgagcgcgcgcatgatcgtctcgggcgcgggagcgtccatgtagtcgctagtggcggggaggaaggagggaaggcgagggggtgtcagcggagtcaaaggatggatttggtgtaagcgagcgtcgcaagggggacgcacaagcggacgaggtccttgatgccgagtttgacgagctcgagcaccgtgttggcgaggttcgagcggagaatctcgggatgtgtctgctcctcgagctcgctcacaaaatccttttcggtgtagagcctgaagcacttgcccgggcgagttcggccggcgcggcctgcgcgctgctgggccgaagctttcgaaatgggcgacacgagcagcgactcgacgcggatccgggggttgtagactttttgcttgtggaagcccgggtcgacgacatagacaatgccgtcgatcgtcagcgacgtctctgcaatgtttgtcgagatgacgatcttccggccgggcgcgccgccggcgacggctggtggcggggccgggtcgaagattcgctgctgctggttcggcgggagggacgagtagagcgggacgacgaggagcgggccgacggcgcctgccgagtttcgtgcgagctcgtcaccctcgcccttgatcttgcggcacgcgtcctcaatctcctcttcaccggtgaggaagagcaggacgtcgccctcgtcctcggcctggtggatcatcagcaccgtccggatcgcagcctcgacatagtttgtctctggctcctgcgtgtagaatgtctcgaccgggaacgtccggccagagactttgaggaggggtgcgagcgtcggcggggcgttgagcgcgagctgcgccgtcggcggcggcgcgaggacggtgccaaagtacttttgaaacttcatcgagtcgagcgtggccgacatgatgatgatcttgaggtccttgcgccgggcggcgatctgcgcgggcgggcaggggcgagcgggcgaagccgtcagccgtgagcgcgcacacgttgagccagagctagctgcacgaaagcgacgacccacctccttgagcaagcccatgaggatgtcggtcgccagcgtccgctcgtgcgcctcgtcgaggatgatggtcgagtagcgcgagagcatattgtcgttcattgcctcgcggaggagcatgccgtccgtcatgtacttgagaaacgtcgagctatcggtcatgtcttcgaaccggatcgagtagccaacctgctggccgaggggcactgcaacgtgcggtgttggaaagtcggttgtcagcgggctgtggcgagctaaggccgaacttgggaaggaagacaagggatcgcaccgtccatctcgtcggcgactcgcttagcgaccgacatggcggccactcgccggggctgcgtgcacgcgaccatcttgcccttgaggtgcggcaggtccgagtaggcgacaaactgcgggatcctagcgggcggggtgtgcggcgccgaaaggtcagctatgacggccatgcgagattcccccagcggcgcgagcgagcgggcgagcaagcgagccttggaggaaagggaaggggcaccacacgcactgggtcgtcttgcccgagcccgtctcgcccaccatgaccataatctggttctcgttgaaaatgtcgtagaactccttcatgcgctcgtagaccggcagcttacggcggccctcgaggatcttggtgtaggtttgcgagaaggggcggttcgtgaaagggttggtcggggcgtcctgagggtgggaggagggagagttattagttgactggagggtacggtgcgacggcgggaactgtcgagctgcaagagagctgctctggcctgaccgcctgcctggacgcttagctccggcgctctctcggctcgcagacggctcgcagactcgcgcgagctcgtcaggcgggaggagcttccagtggcgggcgcgaagctgcccgactcaagcaggcaggcagccggtaagcacaacgcaccatgagtgccctagcctgcatatagtcgacctgacccggcacgacgcccttgagcggcgcctgctgaccgctgctcgacgaggccgagggcccgtccatgaatccctttccggaggccttcttgggctggaggtgggcctgggtgcgtgcgtctggaagtcagcaagtgcagtgtgagaggcaggcccgatgacgtacgaggtaagggttgtcctcttgcgtctttgaccgcttagctgagcgctcactgtcggacattccgggcgatgacgtgtgtgagagggagggagggtgacgagaggcgaggagggtgggtgaggacggagggagcgagagcaagagggcagggatttggccggccgaggctcgctcgaccgtgggaaccccttaaaacacccgtgcgtccctcccttctcgctcactcctcacccgcatacagccatgtcgacccctccttctctgcctcagcaaggcacgatgggcccaccccaacttccagctactgacggcctcctcccgccgctattgacaacagcgaccaccggcctcagctcagccccaacctccccgcctgcctcgccttcgcgccgcgcctcgccctcctcccagcttctcaagacgcccaaagccctcaaacaaccgtcttcgtcctccacgtcctctgccgcaaagagctcgactgctcagccccttgcgccgggagagaagccagtcgtgctcggcatctgctcgatggacgtcaaggcccggtccaaggcgatgcgcgagatcctgacgcggctcgtcgagattgagggcgaacgggtcgacattaagatctttggtgacaagacaatcttggatgagggtgggttcgcgccgggcgccttcttccgagagggatgcgtgtgtcactgtactgatacccttttgacgtttgcctgcccgcaccctgcttcgccgcacgccagacatccaccactggccctcgaccgacatcctcatctcgttcttctcgaccgactttcccttgccgaaagcgatcgcctacaccgagctcccctcgctccagcccccgccgatcgtcatcaacgacctcccgctccagtcgatgctctgggaccgtcggctcgtcctcgccctgctcgaccatctgcgcgtgccgacccctcggcggatcgaagtctcgcgtgatgcagggccctacatcgaagaccgcgtgcgtgatcggctcacaaagctccagctcgtcatcccggactgggtcgtcccctccggcggcaaaggcaagacgggcgtcgtccgagggcgcaacgtcaggctcgtcgaaggcggcgatgcgatcctcgtcaacggcgtcatgatgcagaagccgtttgtcgagaagcccgtcaatggcgaggaccacaacgtctacatctactacaagggcggcggcggccggaggctcttccgaaaggcaaggccgttcccccttgcgcgcgaagtcgggccgcaaaagaggggcaatcagaagggggctaactctccctctttttttgcccgccccctccttcaggtcggcaacaagtcgtccgaacacgacgacacgctcaacgcgccccggaccgacggctccttcatctatgaagagtttattaacgtcgacaatgccgaagatatcaaaatctacacggtcggcccgaccttttcgcacgccgagacgcggaaatcgcccgtcgtcgacgggctcgtcaggcgcaacacggacggcaaggagatccggttcatcacgcagctttccgaggcggagaagggctacgcgagccggatctgcgagtcctttggccagatggtctgcgggtttgacctgctccggtgcgagggcggtgagcgctcgctcgtgatcgacgtcaacggctggagctttgtcaagggcaatcaagcctactatgacaaggcggccgagatcctctcgaccgtctgtgcgcaggcgcgcgagcggagggcggcgcttgcgaggctcaagctcgcgacgccgggggggacggtccggctcagggggccgagctactttacggggaaggagggcgcggcgggcgggcaagaggctgggaagcagagcggggcgacaaacagcacgctcaaggcgagcgtgacggtcttcaggcacagcgaccggacgcccaagatgaagtccaaggtggggcctctctctcctggggctcactcgctcgctcaagcacccaccactgaccctccccccctatctccctaccctgcgccagttcacgttcaacgtctcggagccctggggcgcgccctttgtctcgctcctccggggctaccgcgaggagattgtcctgcgcgagggcaagcagctcgacctcatcctcgacgccgcggccgaggcggtcgcaattggctgcccggcggatgtgacggagcggctgacgaagctccaggacgtgatccagcggaagaaggacctggtgcgtcggacggatgctaggagagctcgagtggggaaaaggggctgacttgttggactctcctcgttgctcgttgtccgcctggcagcccggaacaaaggcccagctcaagccgaccttcccgaaggacgcgacggccaaaaaggccaagaaggccggcgatgatggtgcgggcggcggcggcggcggtagcggcggcgggaaggacgaccacgacgacgacggctcgacgaccgagacggacgagcggatccggaaatggatcgcgacgggcgacatgcgtgcgcaggaggtcggccttcacgggcatgaccgcggcctgatggcggacattgaggagggtgaagatgagagcgtgtcgacgccgacccagacgccgggtggcgtctcgcccgtcgcgatcccgggcgccgcgagcagccgcgaagcgagtgggggcagcacgaggacgagcagcttgagcgtgccgccgtcgaggcgcgtcaaccccacgttcccggcgccggaggggctcgagaaggtccagctcgtcgtcaagtggggtggcgaggtgcgtcccccctctcgatcgaaagcctgctctctcattgcgctgactcctttcgccccccctccgccggcagtcaacccacgccgcccggtaccagtcgaaagaccttggcgaaaactttaaaaaggacatcaagattatgaactcgtcgatcctgaagaacgtcaagatttacacgtcgtccgagcggcgcgtcatcaacacggccgacatctttgcgcgcgcgctgctcgataaggagtcttcgggcccagcagcagacctttcgtcgtcgcgccagtcgctgctcgacaaggcgccgctcgtcgaccatctgattcagcggagggacctactcgacgactcgaacgcggcaaaggcgctgatggacggcgttaagaagaagctcaagatcttgctccggccgggcgagtcggaccggcggccaggactccactggccaaaggagatcaagaaggagcccgtccaggtcgtccgcgtgcgtccggattttcccctcagcctcctccttcgctcgctcgcttgctgaccgccacgttgctccgccccgcccccgcctacaggagatcgtcgcgatgatgactgacctccgcaagattctgatcgacaattttgagacggtcaatgtcgacaagattcagtcgcgctggtgctctggcgactcgcccgacctcttcaaggagcgctgggagaagctctttgaggactgggtcggcgtcaagaaggagaaggtgcgcggtctgcctttccctggtctgcgcttgaaagcgccagagctgacgccattgggccaataccagttcgacccgtcgcgcgtctctgagctctacgactcgcttaagtacgactcgctccacaaccgcgtcttcctgttcgccatctttgacccgctctgcgggagcgagccgatcccgaccgtcgcgccgcgcgaccgacggctgcacgagctcgtcgatcgcgcgaagctcctgtttgacctcgtcgcgccgcaggagtatggcgtgcgtccctgcccccgccctcccttccggcctgttgctccctggctgactgtcccggctttgcagattgagcctgaagagaaggaggagattggcatcctcacgagcttgccgctcctccgcaaggtcatcgaggtttgtcccctctctcgcttgataactgacggcggcgccccctgctgacttcatccggccccgctcgcttcctgcacaggacctcgagaacgccaaggcgagcgacgagtcgcacgcatcgttctacttcacaaaggaggtgcgcctccgtgtcataggacgcccccagccgaagccatcctgactccgcatgccctcctccgacagtcgcacatctacacctacttcaacctgctgatggccgctggactgccaatggacaagaagaagaaggtgcccgagctcgactatggtgcgtcggcccctccttccggcgcagcagcctcgtcttttgcgactgacccagccgctgccgccctcctctagcctcgcacatcacgtttgagctctacgagcgcacttcgtccgaagacgccaaccagaagcgcttctctctctctatcgccatttcggagggcgcccactcgcccgcgatcctcgactcgtcggtcgacgcccggcactcactcaacgtccaggcccggaagaagttcctctcgtgagtcctcggcccggccttgtcgtccagcttcccgaccggctgctgacctcacatcgatgcgtgtcgttgcccagccacatgccgttcgaggaggcaatggttgccctcaagcagttcgagggcaaggtgacgcagtcgaacctcaagttttcgacgacgccgctcgagggcgaggccatttactttgaccggaccatccacgacgagctcgtccttccgctcagtcagccgcggtatggcgaggtcccgtcgagcgcgagcagcgaccgggcgagcgacgtctggtagcgccctccggtccgcttctccgcttctccgctttccgccttcccttccccgtcttcttaaccctttatccccgctgcctggctccccgctgcctgatctgctccgctccgagtgtcccgtcttgaggacgcgctagaatgactgtctgtctgccgatgcatgcttgtatctcgaagctatcgaggggtctgcccggcgggcactctgcgaggatgacgacacctaaagggccgccgtcaccgtccggcgcaagactgtctgaacgagaggaggagggagcgcctgctctgaacaccctttgcggccttgctcgctcgctcgctgggcggccctgtgcgacagaccggttgcgatgtctcgactctggcgtctctgaatcaaacagctcccgggcacgccgcgtgggttggctcgaaaaactccccgcgccgtcgccccgcccagaggcccgagcccgcacgccagagcccgctgcgaccgaaacccctcagcagccgccctttgatcggctgcgtgcgacaccgacggccagcctgcgggcagacggtcaggacggaacaggcccgagacgaacgggcaagcccgaggctgctgctgctgacagcccaagcaggcagactggctgacctggccgaagaagggccttgctccctcgctcctctcttgttcgctcctcctctcctcctctcctctcttctcctctcctctccgctcttccggttccacgcacgcctcctctcgcctcgtcactcgagccaacctcctccggacccctttcatccctctttttctcacccagccgacccctgtcgcctcctgtcagacgcatccctcctgtcggccgccgccgttgcatcgtcacccgacgaaccaccggcacctcctgattgccgctcgtataaagccggccaggaccataccaagacagactgcagagtcccttcttctacccctcaaacgcgcgcgtcgcatcacccaccctccagcatgtcctgctccacagccgccgaccggccaagcgacctctttgaccggcctgccaccgcggcccacgccgatcgccggctgtctagcagcaccttctccgacctgccctcctcctcctcctcctcctccccctccttctctctcgagcaccgccggcgccggcgctcgcgctcgatgcgcgaccgctcgccctccgctccggcagcgatggccatcttccccgtctgcgctgctgctgctgctgcgcctgccaatgccgacggcagcgactccgacgaagccgacagcggccggtgctgcaggcgccgcaagtcgagcggcgtccggccgggcgtgctcggccttgggctaggaccgctcgccggtctcagcagcagcagcagcaacgtcgccgccgccgccggcgtcgccgtgaccgctcctcctgcttctgcacctccgatgacggccgagcacggagtcttccggcgcgagcagcgccggcgcaggtcgactgtcgatctcgaggcgtctcgctcagaggacggccgttcgccgaccctgccgcagacggtgcagcagacggccgaggacgtcgtcatggcggacgagacgtcgccggcagcagtagcagcagcagcagcaattgacgccgccgtcgcctccggagtgacgctcgagtcgggcttgccgcctgtcgtgtttccgctcggccagccgacgctccgcgtcgccttcagtcaagaagagggcgaggaggacgtccctccgtgcttctatgtccgtcctcccgtacctccgcacgtccatccggcctctccgaaactgatactctctgttttgcagccgggccaaacgatcccgacgacgcttttctttgagctcccgcgctacacgacgctcgctcacgccctccggcccgagctcaccatgtcgctcgtcggcgtcctccgcgtccttagaccgaccgacggccggcagcagctagcggacgagagtggtgccatcgtcgagcgcagtctgatcaatgtcggcgtctcgctcgaggaggggctcaaactctgggcaaaggatgccggagcaggtccgtcgtttgctttccccggtcggtctcttccccgtgcgcgtagctgacgataaacttcctctctcgtcgcgcgcagcttggacacagctcagcgagcgccgtcagaggggtcgcgccgatccagccgtcggcctgccgggcggcaagtatacgtgcgttcttctcgacgctacctcatcctcgagcgtcgaagctgaccgcctactttccgctcggccagcctgccgctgacggttcaggtcccgacccacccgcgccttccgccctcattccgcctcccaggctctatcttcgagatcgtctatgagctcgaggtctcactgacgatcgaccggcccgactactcgcaagacccgacggccggcttggaccgggtcgagctcgtccggacgagtcgcgagttcacgctcctgccgacgacgctgccatcgcagccgccggtgctcccaccgctcgacggcctgctcgacgtccctcagccagcagcgtccatcgtgggcttaccgacatcgtcattttcgtcggccgtcgcgcagagccaggcgctcgtcgggctcggcatctcggctccaactgggtggatggacaagctccagcaggcctttgtcccgctccgacagacgctcagcagccactcggtcgcgagccagagcagcggcagcagtagccggtcgcattcgccggcgccaatggccatcgccggcgccggcgagggcggcgtccagagctggtctgtggtcccctcgctctccacctcggccttctcgccatcgtcaaacgtcccgctcgacctcacactcgtcgccccggttctgctcgcgcgggcgtcggccaacgacgacgacgccgggccaagtgctgctctgcccgaaggccagctgctcgtcagggcgtccatcatccgacgcgagcacgccttctcgtccgcctcggcgccatccaagctcgaggagagccgcggactcgtgatggaggaggagatcgtcagcgcttccggcgcctttgacctcggttcgctctcgaccagcgaggcttcctcgacgacggtccggctcccgcggatcaacctcccgctcggctttggccagctcgtcgagccttggacgagcgggatgacaacgagcctgacggtctcgcccgatccgtttcaggcggccgagcacgaggacgacgacggccaggcccatctccacacgcactgctcgtcgcgcttctacatcgccctccaggtcgcctacctgccgtctccgtcgccaccgccaacgaacagcagcaacagcagcagcagccggcagcagccggcgatgaacgactttgagctcggccggtcgctcttcatcccctcggtcctccgctcgcgctcgctcctgatccccatcacgattggctcggtcggcgagccctcgggcgcccggcaccgccggacctggcgcgagctctacctcgcaacggacgagcggaccggcgaggaggcgccgaggatcgtctcgggctcggtcgtcgacgacgagcggggctggctcctcccgccgccaagctacgagacggcgctcggcgagaaggagtacgtcctttagagcgcgctccccaactcaaccaagacccgcccttccttcccgtctctgtagaacccctccgctcgaatacacgcaaacacaccttgtagcgcctctctcgcgcacgaccaccgtccctctcgcagccctccaacacgcacacgctcccacgcctttcctttttgcttttgcctcctgactctcactctcgctctccttgcacctgctaccttcgcatcctcgctgtttcctcgtccgctgcaactctgtcatctgcttgtctctcaatcctaaaaatcggacgacagaaagaccggtcaagaagggagcggaacgaagggtgcatggttgatagagaggcatgcgggcgagcgagaggttcattgacaggggcgcgttaagggagagcttgctacaaggaaaaatcggagaaccgggggcggaagagaaacgggagagacgaagagcggggcagggtgtggcgccggaaagaggggcgaaggggcgagcgagagggcgaggggtacaagaggagcgggctgccagagcaggtccatcttcctctccatgacccctcaatccttctcagcccaatgacagtcccaactctctttggattcaacgcctcaacgtatacccggctcgtcctcgtcacggcgcagcatttcggtctcgttgagggccgcgactacgtctatcaggtgcggtcggccgagctcatagtccccttttcaccgctttccgacagtcctctaacctctgcctgcctccttctctgtcgtcagatcatccctgtcatgactacgcaggacgagggtacggctgaggcttaccctggaccagcgagatgtcagtcctgacctgcgcaaccgactgcctcaggcttcgaggacacgcatcccttccgacagctgccgcacctcagcgacggcgagctcgtcctgtatgagtcgagagctattgctcgctaccttttggccaagaagggcctgtggccgaccgagcttgtcccggtacgctcgaactcaaagccccggtgctgcagccacgacgctgatgaccatcgcgctcggcctcgactgcaggcggctctttgggaataggcggcctgggtccatgcctccaactttgactcttcagccttcgcggtctgcttcgagcgggttgtcaagaagtggataggcctcggtccgcctgacgaggcgatgctcgcctggcataccgccaacctgaaccggaagctggcgggttatgagggtctgctcggccggtcgaaggtcggtcatccagcgcaaagtcctctccctcagccgcccgaggctgacagtctccaaccacgtctatagtatctcgtcagtgacgaaatttcgccggctgacgtctggcatctgctacacggccaggtgctcgtcgacctcagcgcgcttccggctttgactgatggctcgctcccacacgtcgcccgctggtggggcgagctcaccgctcttccggcctggtccaaggtccacctccaggtcaacaagctctaggggcgaagggcgtatgcgatgtatcagcgtcgtcatctcatcgctttcgtcagaccccgggcggggagggtgctttgcatccgaccagtatcatcaatatatagcttgcctttgctccaacgcaccgcctcctcgagcttctcaaagccttcgccaatgaagaagccctgactgagcggattgccctcgttctagtcggtgacgagccaggcggggccgtggtctccatctcgctgcccgacctgtcgcgtcatctgcagcagctggccgctcgacctcgccgctcctccagggcgttgcccggcgagctttcagctctggctcgggcagcggccgctcgtcgtcgtcgcccaggtggtcatccgcctcgacctcgctcggtgtcgtcgccctctcggccctcggctgggctcatctccgcaccgacgccggcgccagcgggccgatctactgcgagagccagcactgaagaaagtcaagcaggtgggcaaacgaacatcgcgtctcgagctagccgccctcgctctcgctctcggtcggatcctcaatctcctcgatgacggccgagctgcggtcgctcgacccatccacgtcctcctcgtcggcagacgcgtatcctgcgacaccggcttcgacatcgacgaaccggcgagcgagggccgaaagctgacgcaatggcttgagcggtcgcttcggaggccgacgaggtggcggtgagacgctggcggacgcggatgacgccctgctgggcgaaagcgagcgagcctccgctcgtggtcgagagccatcgtgtggcgaacgaggtgccggtctcgatggtcctgcgttgggggcggcaggctcgatcttagtaacgcctgcagggtcgcctgacgacgagcgcagccccgaggccgaggacgcctcgtccttgtgctgctgatggacgcgcaagtcgagcgggaatgggaagcgtgaccgcggagaggatccggtcggcggcggacaaggatcgggtacagcttggtggtctggagtctgcgtgaaaaattgagggtcagcttgcgctcgacttgcagcgggagatggagacgtacttcgccaatcttctcggcctgggcgatgccttggtcgtgcgcgtctccatgccgctcgttgccgaggtccaatgaatctgaagctacggttggaagccggtaaagagcagtgctggatatcgaagaggagttggcgaagccaggcgtccagctgtcgaccggcgaggcgacgttcgcccacgagaatggtgacggtccgagtgcagtgccagggtcattacgaggaccgaagtctctcttaccggcatcgaccgacgggggcgaagagtagcgcggctgcggttgctgtagcgttggcggcgagaatgtccgatgctgggcattgcaggagcaagagagcgtcagcaaatgaggttgaccggcggcagtcgctgcctcaaaggactcactgctgcctggtcccacgctgactcggtcggctcggcttgcaaagcctcctctaaccagcccgaccagttcttctccactcggtcgagtactaccgccgattctccggccgcccataggttcaggtcgggcgcctcgtcgtcgcagtactccttgcccgggcccggcctcgcaaacaagccttgcagctcggcgtcaccgacggtcggcgagagcagcccaaaagcaccaaagcctggatcctgcaaattcagacgggcgggcgaagatggtcgatgcggcgtctgctcggcgaagaaaggcgcgtgattgactggccggtggcctgactggcgcggtgcgagcggcgtagaaggacgatgtaggtcagacgtccaagtcatcggcgatggtgcggctagtgaagcccaaaggggtcagctaaacgcgcatacgatgaaggaaagcagtggacgacgcaccttgccatgcgtccggcactccctggccgcgcggacgcgcatacacccctcctccggcccactcgtattcatcgagcgcgctcgcaggctcaaggaagccgtcgaccgggaaaggctccttgaatgagggcgccgagtcgatgccttgctgatagtaaggctgagagaagggcgttggatcgcgctcggccgggcgcgaaccgtcatcgttgccgtacgctgcgagtggcgcggccaagtcgaaggttggaggctgaggctgcgacggcgaatagaggaccgtcgtctggggaagcaggggcagaaaggccggcacggcgggaggtgtgcgcagttcggggtcggaagacgacaggccgtgctggtcctggagggccaaccataggaacatcaggagcctgcttagacgcccaagtgaaagctcggggaccttgcgagacgcctcggtctgagacggcgggtcgagagcgggctgctgaatctgcttgaccgaccgttgccgtcgcccagcaccagcaccgacgccgctccggccggtcgtcgcccgctcgagccgctcgtattgttcgttcagcccgcgatagcgctccgtcttgccggaggcgaatcgcgggtcgtccatgtgtgacgaggagccggagactgcatcgccaatcgagacacgccgtctgaggtcggagagtcgcgaggagcccgagctggtcgtcgtcgtcgaccggagccggccgccagagagggtcgacggctggcgctgagagccgaagccggctcgacctgccgatagcggagacgagctggcatcaaaggacatgctgaggctggtggtggtcggacgcagagctgcaggtcgatgctgagcgtcggaggcggccgagtgctgcgcgcggacgaagcgtttcgagccgcctcttgctgggctgattagcagagatctgggtcagcttggtacgctcacgatgcgcaaccccaggaggggagctcaagagggtatggggtcatcaggattcggaagaattagaggccacctgggagggctcctttctcagttgcgggttccgggcaggaggaggtcaaaacgaagcgtaacacaaggtgaaaggcgagggagacgagacggcatatggcagagggcgatggagaagacgtcaaaaggcgaaggctgcgacagaaagagaggggtggccgagcgaggtgcgaagggaagagagacgaggtgaggaaaaggcttgccgagtggagacgattgacggccgagagcagatagttggacgggtgtatgcggatgcgaggaggcaattcaggcggacgacggcttcggctccgaggacttgcagcgctttgtaccgcgacgaggagggtttgaagtagagatgaggtaggatggctgattgaaggaagtccggtcgaacgctccggatgaggctgataacggaaaggagagaatgtcagcgtccgacgcagcgcaagctcgaagagccgcaagacgtacgcacggaggagaggctatttgaggacctagtttgcgagcggccaacgacaaggccggccttcctcaactccggacggcagcggccgagaggctctcggtgacgacggcaggcagcgtagagggcgaggcgagagcatggagcgtgatgtgcgacgagccaggcgaggctgaggtcgtcgtcgtcgtcgccggcggctgcagcgtgctcgtaacgacggcgggatggctggccattgtcgtcgagccggatgccgtcgagctagagacgtcggcgcttgatgagggctctgcactcgcagcgagttgcgagagaggcgacccgctcgtccggcgccgtttggccggaggctgctgcggacccgattcgctggcggcggcgaccggcggggggctgaccgacgacgacgacggctggccgacgagcgtcgaagtcgcgagcggcgacggcagcggcggattccaagctgtcgagccgagacccgacttgcgtttgggctttggccgggcgacggtcagcgtcgtcgcgcgccggccggcggtggtcgttgtcggagtcgcgaccgtcgtcgtcgtcgcgacggcagcggccgccgacgccgcggcagcagcggctttgccggccttgttcgcgagacctcccttgctcgacttgctgctgctcgacccgacgccggtcgacccgcgcttgtagggatgcgagcggccgttcttgtccttgccggaggaagctgcagcagcagcagcggcggcggccgaccgggttgcagcggcgcctggtgcgagctcgccggcacgcctccggctctgcttcggtgggtcggacgggaagaggaccggcttaggctgtacgatgacgatggccgggactggcggcgtatagcggtcgttggcgaggacgacggccgagggcgaggcgaggcaggtggcgaggatggtctgcatgtcgagcatccctccggccgagcgggtccggccgtgcgcctgcgactgcgtcaaggttgtcgtcgtcgagtcgtcgtggctgctcccgccgccgccgtgtgtgctgccgctcgagctcgtcgctgtcgaggtcgccgtccgggcggctctcggtgagccgcgcgaggacgaggtcgaagacgtggacgagccggccgaggcggaacaggacgctggaggctcgaacccaggcgggaagacggccgttcgagagagggggagcgagcgcgaccggtccgtccgcggcgggaacgtcaatgcgacgcgagcgcgagagggcatggtagacttttttttgcgagctctggagacagagtgagtgaaggggctcggttgggaagaaggtgaggtcgaaagacgggcagggcgaaagaggcccgacgcacgcgccgcccagcagcgcaggccaacccgcttgctctctcgcccgcgcgcgcgggctgctgtgtgcgtcgtcgtcgcctcgcgcgggcctcgactgcgcgcccaactccggctgagcctggcactccaagttcaaacctggcattggatccgtttgattacagccgacaaagggccgacgggggcgtcttcgagagtacagagcgtgcgtttccgagtgcaagaggaggagttctatctgaccggtgcgctctacagaaggaatgtcgcagccgagggcaagcggatgaatgaccgcgccagtgttgcgaagtgaggtcgaagcggcctgcgtcggcggcgggcgtcgctcgggtgtgtcgttgagtcgagctggccgccctacatgatcgtgcactcgccgttcttgctctcgagttcgctcccgagggctcggccgcgggcccggccgctcccaccggcgtggccgtttggcagactgccgttaccgcccgactgaagctggacgacgaggacgcccgagttgtgcgggtcgagcgcggcgtcgaggtcgtacctgtgaagagggaggcaggtcttaagcgtcaaccaaggtcgtagacgattccagaccgtcggacgcacttgtccatcagatcctcgatcgccggccggatcttggcgacgtggccgaccgagtggttgcccttgccgacgatgaagcggacctcgcggtcgcccttgcgctggcgctcggcaatcgcctgctcggccttctcgaccgcctccttgacgtagagtccgtgaaggtcgacctcgcccgggctcgagtccgtgttgttctggtagtaaatccagtcgcgggcctcgctgtcaatctggcgcttgcgcgcctggtgctgcttgccctgctccgagagctcgtgcgcgcgcgcaccgtcgccggcctggtaggcgttctgcgactgagcaaagcacttctgggcgaggtcgccctcgtgccgagccgagtcgcggagcgcgatgtacttctcgttcgactggttgaccatgttggggtcctgtgaatggccgggaccgacgacctggccgtagccgccggcatctggccggtgggcctgcgtcgacgactggtgatggccgccctgtgtcggtcggccgccgccatgatggctgccggggtacgacggctggctctgcggcgggtaggcgtgctgcgggttgagcaggcgagcgaagtgttgacgtcagctttgagatcctagagagaagaacgcgactgcctccgttacgagtatgttcaacaggatcgcacctgctgctggccatagccctgtcaggcgtgagagagcgtttcggcgagacgatcacggttgaaggtcggatgcaaagcaggttgcggaagggcgggtgtaccgagcgagttgcaagagacgtcgaataccaaaagggggaggtgcagtgccaaggaagtaggatggagaggtgatggtcagtctgtcaatcaaccggaagcgaaggtgaggaggagacggacctgctgctgctgctgctgctgctggccaccgttgccctgctggtgctgcgtctccttttggtacgactgaaagcacgagaaggcgatgccacagagctgcttgatgagcccggtggacatgtcggcgatggctcggggagagtaagggcagggtgtggttgagcgacgagagcagcagctgggcctgtcggttggccgggcggaggccttccgtccgaagccggcgggctcgctcgatcgcctcgcgggcggttttaacctcgaacgccgacgagtcgtggccgccgacaggggtccgacctcgtcggccgggagagacccgagcccagtcgacaaggagacctcgaagcacaggtcttcagcagagagcatgagttgagagagagacggcagcgaacgtcaggaggaggctgtccgtctgccggccgtgcggaggccggtccaagaaacggtctggacgagagatgtgcttggccagcctctgcccgtcgccggtggcggcgagccaaaccgtcgacctcaggtctctcgacggccatacccattcgtcccaatctccctctctcggttgacacgcacactctacgctcgacatacgactcgcgatgcctcctccaggctcgacgcaccggccgttgacgctcagcagccaggtccgcggtggcagccagctgctcgccacagccggcgcgaaccgctccaagccgccgtcgtcggaccggctgggcgagctcaagggcggtggcagcagcagtacaggtagcaaagctcggtcgaggtgcgtcctgcgttctcgtcgctcatcctgcaaacctgagaaggcgttccatcgcctgggccggggagaggagactggcccgaacaaggcctcattctccccggtggcccggtcgtcgggtcaagcgacctttcgtcgcccgggggcgcgcctagagtcacatccgctcgacgggagctcctccttcgtctttcaaactgtcacctccctcgaccaaagactgacagcaggaccgtctgctttctctccctcgtcgccgtcgctcctcttctttccgctcgcgcgaccgacgacgcaccttgcaaaacaaccgcctcccgatgtcgcctcgtcggcccggtagtagctcaggctcgggttccggccgaggcagcagcaaaccctcgaacgaggaccgcaggagcgagctcgccctcgccaggcgcaaggtcaaggtccgtttgtcgctcttttcctccctcttggcgaggcttccgtctgcatcgccttgcgacggcacccgtcgcacgcctgcgcccgctgcttgatgagacgcgctcttggctgacatcaccctccttcccttttgttcatcctactgttacccattctatcagctgctatcggcatttcctcgtgcgctctcgccgaccttgccgccttcaccgccggcgtcgcgatcggcctcgcctgagccagtggcaacggcgccccggccgacagccgcatcgaccggcatccgaccgttcgaggagcgcggtggcaaggcgtcaattccttcaccgccgtccgaggccgaaagcggccgaagcaatacggacagccagagcacgagcagccgaggtgcccgtagcaatgccagcggcgacagcgcctgggcgggcagtggcgtagcgctcaagccgtcagccaacggcggcgcgggagatgatgccgccagtagcggaagcctccgggaccgcaaacgccggcgtgtcaatccttccatggcggacggcgatgagctcaatgtccgacggtcggcgtcgtcgtcttctcgccggcggcgcggtcggggtcacgtcgagagcgaggccgagacggctagccgacaggcggctctaactgcacgagcagcgacggtctgggacgccgataagtttcgcagcctcgctcacacgtacgtcactgtcattcatggctctctgtcgctcctaaaccccagctgacgaccctctgtaactcgccttcagataccgcgaacgcgctcgcaagcttaagcacacggccgacgctcggtcacgcgccgcctcgtcgaccctcgcccagcagcagccaccgtcgtcgctcgtcttcctgacggagttgaccgactcaatcctgctttgggtctacgccttttgggccgacgaccaggcgacgcccggccgggtcaatgttgacatgtggcgctcgctcgacggcatgaagaaggtcgtccgcgccggctgggagtcggtcgtcaaggcggctgaggaagcaagcggcagtccggctggacgggcgcgactgcgacgcgtgcgggccgtcctcggtcttgtctacctcgtcgacgcgctcgttcttctgcacacgacgacgtacgcccagtcgtcgctccacaaccggacccagcgcctccaggcaacactcccccgaccaaacgctgccgctggtggccggcctaacgggacagtcgcaggcagctcgtcctcactcccggccgactcgccagcctcgctcgcctcgtcgtccgtctcctcgccgacggcttcatccgacccatcgggcgcgccgacggtcgccgctctcccggccgactacctgccggccgtcctcagcctgacggcgaatctcacgcgcgcccttcgcctacacgggacggcccaggcactccttgctgagcgcgacctcgctcgcgacttcccgacgacgtggagccgctgccaccccgctgtccttcattcttccaagcggtcgcgctcggcttcgtcagacgacgatagcgccgggtccaattcgtccgacgacgaggccgacgacgtcaatcgctcggccctgacactagcggctgtcgttgccttctcgccggcgagcccgcagctcgtcgacccggacacgccctcgctcggatgggcctggccaatcggtctcgcctcgatcccggccctcgctggcatcccgggcgtcccgcacctgccgtctccactcgccggcgcgcccggccaggcccaggggatgggcggcatgctgccccacctcgttggctttggccggagcctgctcgccgagtgggccgagggccgcgcgcgcaaggatgccgacctcaagggctgggtctacgacctcggccggggctgggtagcacccccaccgacggcgagctcataaaggctgcccaccaggaggccctcgttcttcaccaacactttctcactttcctttgccgctctatcgtcctcctcgctcgtccatccgcactatccgcgcccgtcccgaatcttccgccatctctttcactcggctcgctctcccttccgctcgggtccgcgcctcctttttgtatgcctttactcaccgcgtcacgaccctttgctttcctcggctccgctcaccactgtctatacctcttcgatctctcaaaaagaaccaaccgcctcctcgctttagcattgtagaccgcactcactaatgacccactgcttcctctttatggccctcttccgtcggctgactcttgcgggcgagcatcgacaaaagacatacgagagcaacaagcatacgcaccgagagcttgtgccgacgagggcatctataaatacggccggggttgccgttgactaggcgcagcgattcgcctggcgcgccgaggattccgttctagttgcggaggatcaggtccgagcgtagtcgccggcgcgtgcgacgattcgcccgagacgactcagccgagcctctaagagaggcttgaccgagccgtcgcggaccgcaagagttctgtgggcaacgagccaatgaaaggcgcgcgagacggctccagacagggttgttgagctgaagggaggcttggccaggtggaaagacgagctgaagtgcgactgcgtagcaacggggacggggtacgtacaaggtgtcagcgactgttacgacaaaacgactcgtacaacggaaaggaggaaagtgtgtgggagggggtttcctaagtaagccatgcatttttgtccgcattattgatcggtgagtataaacaaagatgaaggggtatcatcattggaaggagggggggtggttgggagttgagaaggcaaaatgcgacgtacctcggccctcaaatgacgttcgaccgcgaccctacagcgtgcaagcgacagcgccatgacctggagtctcccgagcgaggagacaatcgaatctggcagcaaaaggggtcgaaggcgggtcagcatgggagcgaagggcgagggaggaacagagtgaggaatcgtgtgtgatcaggcgtagtgcggttttgtcgtcaattagagcgcagagcgctctatggcgaaagactaatcggacatcttgttgaaggccggtcctcccaggaaagggcgggcggcattgggttgttggaaggaatgaaaagtagacgtacaggtcgagaagcggggcgcggaggcggcgcgcttcagttggcgcgggattagcttgacagcgcgagccttgtcgaccggcagaattgccggacgacaccggcgaccgggtgatcgaccctgacggctgggtcggcgagggacgagtatggaggtcgttgtcgaggagaaggcggcgagacgaaaagacggccgaccggccaaaacgcagtcgaaactccgacaagacgagttcccacgccgccgtcgccggccgaacctcgcctcgaccgagcgatggcggccctcgatgccgaccttgggcaacgacgtcgaccgcgagcagggtcagaggagagcagcgggctaacttagtttgctgactgctcgaaataattcgagcgaggacggccacttggccagcagggcggtttggccgttggaacccatctcggccgcttggccggctccgcagctctcgcccgccaagaagcgctgcttgcggtgggctcgcttcctgccttctaaccatcaccttcagcctcgctcgacactccaggtacgtctcgcctcactatcgacaggctggatccaagggcagcgcgccatcgcccgtcatagaggcggccgctccatccctatcgccctcctctctcttgacctcgacctcctggctgaccagcaacccctctagcaatatcttacctctccaccgctccagctttccttcaaaggacttcttaatcggctcatgtcctccttcaatagcaccggcccgccctcgtcctcggcgaccaccagcggcgcaggcatcaaaggcctctggtcgaccgtttttaacgccggcgagacgatccgtcacacgttcaacgacggcgtcgacagtgccggccggaggtgcgtctcgtctctcgtccaggtgttctggacgcagctgacgtgtgcccagtacttgttcggctctagcctgatcggcgacagggccgcacccccgccggggtcaaaccagcgcgctgctgcacaaggcacctgggaggagcgcgcgacgtcattcaagggcgaggagcagctccggtcgttcatcaaccggctcggcaacaagaagtaaggccgcgtcggcgacagggtcgtctttgcaggctcgccttcgcaggcccagggttaatctagcgaaccctgggcgccggccctcgcaccgtcttggctggtcagatgccttgcagccaagccaatcgttctatccgtcaaattgtcgacttcttcctggttatgccggccggcagcgccagtctgcacgctcggcgcacccacgcccgctgccacacaaaatgcccagtctctgcctgccgcaatgcaatggagccttggccgcttcctaccctgcctgcggttatgaagatgccaatctgagcgaagacctgaccagtcgtgctgtcggcttgccgagcaaggactcttgatgacggccaaactgggggccccgcttgcgctcgcgactgctatcggcaggagctgcttcgcttcgacttgatgcgtctcaccatcacctcgtctcgcttgctcctatccttcccctccgcactgtgagtcgccgtaactgtatcgttcgacgtctgccttgagtctggagcggaacgggcgtgcttcaagctctcagcttgctctgcgtctgccttgggccttccgactggctgatcgcgcctcgcctcgctccctccagcctcgcctcttcacctcttccaacacacgacatgtcatccggcacaaacgcaggcacaaaggctggcgagggcatcaagggcgcctggaccgcctttgactcggccggcgaggcgatccgggggacgatcaacggcgcgatcgacggcgccggcaaggcgtaagtcccgattgagcgacctcgctcgcaatcttttcagctcgggtcataactgacatctgactcgcgtgctcgctcagtgtcgtcggcaacgacgcccgctcggccgagtcgcgtgcggcgcacgacgctgcgatgcagcgggacgagcggacggcgagcaagggcgttgagcaggtctcggccgtcttcaacaagctcagcggcagcggcaccaagcactagggcagtcaggcgtcctcctggccgtcgagatgggcagtctcacacttcagatactgccccgaggttgagagaagagtcgtcgacgggcgacgacaggaggcaagaggagggcctcggacgctcgctcgggagcggcacactgtatcgaacgagctctgtaccgacagggagctctctgccagatatgtttccgctgtcgtcaagcgcaatgcctgctcctctgacgtcgtgaggccgtgatgagaaggactgttgcccttctgcgacgactttcgactctgcgcagcgaccgagtctcagagcagaggaagcgtcgctgctgagcactctgtcgacaccgactacttctgtcgacgaccagcttcgcacttccatccatctccagagctcagcgagctcagcaatctctctgttccgcatccagttgggcgcatttcccagcttcctccagcccgacgaccgcagaccggtcaagaaggcttgttcctcctcgcgtccggcaacgctgcgcgaccgacgcccgtccttccttcccgtctactaccagccgcgccaggtcgcttggacactcgcaattggtcagtcgtgccgtcatgactatgcgccaagacttcgccgagagctgacggtttccctcctctagcgaccttcacctcttgcctcccacctgcccggccgccctttgatccgaccgcgtccctcaagcgtccggctggcctcccgtctgccctttgactagttctcgtagcacgtcgagctggcctcttgccagtcgtcatgttccgctcggccggcaacctcgcctcgctcctcttcccttcgagctcgccctcgtcgagctcaaagcggtcgaccccgcgccggcgcggctcggctaacgagccgccctctgacagcccgtccgcctctggtcccggcaacgtcggcgagttcggcgaaagtctctcggcctcgacttcttcctcgacatcgggttcaagacgacaccttgccggcgccggcgccgctctcgattctcagccgtcgcaggcgctggccaacggcctgaggactgcacccttgagtcctggcccggcgccgagctcccggacctttgtcggcggcggaacggccagtcccggccgtcggcggtcgtctgatcgcacttcgcaggcatcgacggccggtccaagcgcgccaacctcgttgagaggctcgccaatgccgagcaggaaacactcggccgctctcgcacgctcgccttcggcgctgggcgagctcgacctcggaccgcaactcacgattgacgagctctccgttgacttcgcggcctcggtgacgaccggcgccacaaccgggccgcattccaaggtgggagacgccctatcgcactcggcctctgcgcccctgagcgagccgttgtcgcctccgccgtcactcagccgtcacgggcggtccgactcggcgccgacgatcaaagggctctcgcgaccggcctcgccgatccgggttgtctactatgcttcggaccaggcacctgctgacgcaggccagcgtccaaagttggctgctgtcgctgtggatgcgctcgagggaggcaaagcgttgaatggccaggcgcttgagggaatccacggctggcagcaggacgtctgggtaacgctccggagcgagggttcgcagaacgagttctatgcgaaccctcgaacgggcgactgctcgtgggagccgccgacgggcgcccttgtgtgagtcgcctagccttctctttcggcttcaagaccgatcgctcactccctttgcatccgctctccatcagcctgcctatcccctccgagggcatatggtatgagctctgcgacttgacgcaagacggcgcgtgctactacttccacacgctcagcaagacgacgcagtggacgcggccgacggccggcctcatcgtcccgctctcgatgatccagctccgcaacctcggcttcttccagccccgagcgacgcgtgcagcgccgccggctgccgaatcccgctcgccgacacgcgaacagccccggcggagaactatctcagccctcgctccggcaagccatcaccccgtccggccggctctagagggcaccaaaaagcattcggcgccgcccgtctcgtttgccgccgttcagacgacgaacagcggcaagagcagcagtaacatcagcccctcgataagcgccgccggatcgcgccgggcttcgctggcatccggctcggcactccgctcggtagacgctcgctccagtcagccgccgccaccgatgccacctacgccacctcagatgcggacgccgacgaaggcaggtgctcggcgagggagcagcggctcgcctgcgccctcgagcccagccaccgacaagcccaagctcggtcgcctcgcgacgcagctgagttcgcgttggggcagctcgaaggacatcatgggcaagtgacgcctgcagcgcctctatcttgaccttgtctaacttgatgctcttctctcgacagcttcgcccttgactcttgcctcagcgacgtcgccgaccccgtcaacgcccatgtcgctgccagccgcatatccagtgccaggaacagccttgcagagcaaacgtttgtctaccggcgaacactacgtccttccctcagacctctcctcggccatccgtgcgtaccaacgtctttcagacgcccactcagcgcttgctgatccttgctctttgctcggccgtcgcagagcgctttgccgtgcccgacttctcggaccgctacctctcgggcaagcacactgagggcggcttccgcaagcgcaagattccaatggagcgtgtcatgcgctggcagaaaaatggcatcaacgagccgctgctcgtgctcgacgctgctcttaaaccactcgcgaccaaagcgttcaggatcgtccagcggacgatgggtgaccgctcgcgaccggtcgacgttccctcgctgagcgcctcgacctcggcccggagctcgttcatgatgctcaaggcgagtcggcctacgctgacggagcgtgagcgtgtcctgaccgaggtccgttggctgctctgggtcggcattacgcacgtcgccctgcgggacgagatctggagcggaacgctcaagcagctcagtttcaacccgagcctgtgagtgtcgacggtgcgatagaggaccgatctggggactgagattccggcttgactccacgcagcgcctccgtgatccgaggctgggagctgctttgcctgctgtcgacgacgtttgcgccaacggcccactttgaggcctacgtccacggctttatccgcgccggcgagtcgtcaaccgtcgaggacgaggaggcggcgacaaagatcgccgtgatggcgtcttactgcctcctcaaacttaaggccaacaagcctgcaaggggcaaggcgccgacgatcctcgagattgagactggactggtgcgttgtgcctacctctagtatgggcaggctgccgatactgatgcgtgcaaaccgctctcagggcgccgccttctacccatcgacgtttggcagcacgctcgaggagacgatggctcgccaagtggcgctgtacccgaccgaaaaggtgccgattatccttcctttcctcgctcagggcatcctcgcactcggcggggcagagaccgagggcctcttccggatcccgggcgactcagaccaggtagcgatggtcaaggaccggatcgaccgcggccggtacgagctcgacggcatcgaggacgtgcacgtctgcggcagcctgctcaagctatggctacgcgagctgcaggagccgctcattcctggcgaccgctacgccattgctctcacgtgagtgcgcagtgttcgaaggggaccgataaaagtatcatcctgacccgtcttcctctcctggcagcgtgtcggccagcgcgccggctgtttgcggcttcgctcggagcttgcccttgtatgtctggttcatcactcgcgcagctgtcgcaccctcacaccctggtatctgacacacaccctgcctgccttcaggatcaaccgcctcgtgctcggctttgtcgtctcgttcctccagcggctcgtcaggagcgaggcggcgacgctcatgtcgctccaaaacctcgccctcgtctttgcgccctcgatcttccgctgcccggacgacgagctcaacgtcccgaacgagacgaacgtcccgacgccgtttgtcaatgccgcgtacgagcgggcgttcatggtccaccttttgcaggcgatcgaacctgcgaccgacctcggctacgtgcgtgtcgcttccgcgtgtgtctgcttttaagatggatcccactaacaagtattgattcgcccggacgacaggctcccttcgccgaccctccagcatgtaccgccttgccagccttcgacacgtcgagtagcccggctacctcgctctctactttgccgccctctgcgccttccatctcgtccacaccggctgcctgaagcccctcgcactggatcgatcgcacgctcatgaagcgaagcgtacccaaccctcactctgcagcgacccatcgagtcgcccgccacctctgctctgccctgccgctccggaccctcgtctttctgcagcttccatcgcatcgcccgcacactttctcgctgataccctagcaactgcactttacatccctatgtatcaatcttgttctaccaggcccgatgtcgttcgggggagagagactctagagctctaagcgtttacaagtgccgaccgcctctcgctcgcccgcgccgcgtcgggtcgatggcggccagctgatcgtcccctccaacctgatccctcttcttacccacccgcaatcctcatcgcaagatttcttgcatgcgacccgtctcgcatctcctcgcagcgacggccgcgttcggcctcgcttcggccgtctttgctccgcgccagacccagcatccgcttgtcgctgagcagcaacagcagctctcgccctcggcttccctcaagcccgacgtcgcgccgcctctcgtacactttgtcgacggcaaggagacgtacgtcggcgcctcggtgatccgtgttcaggcggagaactcggagcggatggccgagctgatggctatcgccgcggtgcgtctctctcccttcctggcttggctccatgcgcctcacatctctcagcagagcaggcacctcggctgtcgctggagatcagctagatctagcgctgacctctgctctctctgtccaaatcgtttgcgtcgtaatccgcttgtcgacgccgctgtggacgaccttgtcccacccgccgctcgcaggccctcgacttggacgtctggtcgtcgagctcgacgcacgccgacatctttatcccgagcccgacctcgccaagtcttcggaagtcgccgccgaggcagggcttcgtccaccaattctttgacgccggcttccagttcacgccgttcacgagggacgtcgccggcctcgtcgccaactcgtcggcggaggccgagccctacgtctcttcgcctgccgccgccgccgccgctctcggcgacgacgccagtggaggccggggcagcatcccgctgagcgatccgtttcacacggcctaccgctcgctcgaggaacagaacggtttcctcgccgacctcgcgcgtgtctacccttggctggcgaccgtcgtggaccttggccagacgcccgaaggccggcctctgacgggtatccggatcggcgaggcgcccgcgagcaaggacaagcgcaagaaggagattgtctacctgagcggccagcacgggcgcgagtggatcggcccgagtgcggtcctctactgggcccactggctgctcgagaacgccaagtcggccgcggtccggccgctcctccgcaacctcgatctgaccatcatccccaacctcaatggcgacggctacgagtactcgcgcgagtcctcgcgcctctggcgcaagacgcgacaggtcatcgacgaggaatcgggctgcgtcggcatcgacacgaaccgcaactggggctatcagtggagctcgggtgttaaggacggcgacccgtgctccgaagacttccccggcgagcaggctttccaggccaaggaggttgagctcgtcgcagagtacattaagtcgcaaaacacgatcggctttgtcgacctccacagctacggtccgtcttggcccagctgcttcgcctcaaaattccgctgacgaccgccgcctctcctcaggccagctgatcatgtacccttgggctcatacgtgctcgatggttcctgacgccgaagacctcgaggaggtcctgctcgggacaactaaggcgctcaagaaggctggcgggcgcgagtacaggagcggccaggcttgcaagctcgccttccgggctccgtgcgtgccgccaatccctcctggcatgggctccaggctgacaccccctctatttttgcgctctcgcagcggtgacgtcgtcgactggacgtacggccagcaagacatcaagtggtccttctcaatggagctccccgacacgggcacctgggggttcctcctccctcccgcccagatcaggcccgttgccgaagagacggtcgagggcctcctctacctcgcccacttcatcctgcaaaaggagggcggcctccggcgcatctgatcgtcgcgccctgtcccctgtctgacggaaggacgcaccggtgatcagggctggctgaggttttgcagacgtgctctgaaccgaggccggccgctgtgaaagaccatgtcggatcggttgtacaaatatcttctcacgacgctctcgggccaactggggcaagttcctcccaggcgatcgcttggcggcagcgctctgccccgcgggagcgacgctggagcgcaccgaggtcggcgacgagcgccatagacggcctgcgataaggtgcggccggcgtcttctgtcagccagcgagatgttcatttttcgttcggcaggtggcaatgagactcaccggccgtgtgcgcactgcagcggcagcttcgtctgggcgagacggcgcaccagatcggctccttgggcgagcgacagccggtcgccgaacatgatggctcctgaaagcgtgtcacggggcgtcgtcagtcgcaatcggcaagtgacaattagaccagggtaccgacctctgcacgccttcgaatcgatcaggtcgaggatttcgcgcggacagaagcgcaaggctcccatccagtcggccactcgaccgcagtcacctgccatcgccgccgcagctgccgctttacaaacgctctcggccccaccctgctcgtcgagccacgcaaggtaagacttgacgagctccgtcagctcggtcggcccttccttgaggtgcttccggccgaggagccgctcagcaacgattgacggcactgtcaggatgcgtgtctggacgtcattctcgcctgagggggtcggcggcaggtcaaaggagattccccagcgggcgagagcgagttgcgcggccgttaaagaagcaagagcttgccgctcggcagccgtgaggagaataaaggtctcggtaggtggcacaaccagtggaatcgcgtcgagaatcgttgaggtttcgtgacggcagttggcgagaaagccgcgtccaagatcgcataaagagcgttcgacgcgaatgcgctcatcggccgcgtgctggtcgatgagaaagagcagtcgacggtccctggctactgccgaagggtcgagcgtcgaaggaggtcctgagatttgcaagaggcaagcaaggaacttttggtccacttgagtaatgactttggccgtctgaagggccttctgcagctcgggaaccgagacgtcgtgcgttgacgtcgataaggaggacacagcgtgaaagggtaagccggtgttggcgtcggttcctgcgctcgacgacgttgggatgctcatctcggttgcaaatgggaaggccgctgtaggatgagacagatttagtcggacgtccgaggtactagtacgagcgagagcacgtacgattgacccacgtctggcagacaaggtgtcataacggtcagtttgaaggctgaggcaagtgatagcgttacggcttacgtcgagaacctccttcagccacggaggcgtgaacgccttctcctgcttgttgtccggctgagagcttgaggtgccgatctgaagcgacgaaccggtttgtcggtcaagcttgaagaccttcttcgtcgtcggatcgcggtacgagacgacgtccggctcggcctgccgtacacaaccaaggttagtctgtcggtcagcaggagcaatatacagaggggatcgctggctcgacgtaccgtcggcacgaaaccgtctaatgagactcgcttcagcggactgtcctcctgcctcatcttcttgccgatcgtcaatctttcatctgactggtcaagatcgaagtcgagccgccgcttggctcgcgagctgcgtgacgaggacaagcggctgaagccgttctgctctagaaagccacagacgacgctcgtgacgaacgctttgacctttggccagtcctgcgtggcaaggacgacggtcagtggcgactcgcttgcgtcaaaggtgggggctggtcgtacctcgaactcgaccgattcgccctcgctaccctcccagactacttcgccgggcaaaacgaccaagttgagtgcgtacaccggcctccggatcgccttccgtggactacgctcgttgcccggccctcgggggatcttgatcggcgacgcgcccgagagccccggttccgtctcggcttgtgcgcgttcggcaaaggaagagtcggcaaagaggtcgctgatgagcgtttggaggagcgagttggaggagacgagcggccggcggttgatcgagaggtactcggtcgagcgagagtgggtggcggcgagggagatgaagccgctgaggcgcagcgaacccgactcggccgcgatggcggtcggtgtcttaaggagagccgatccgtgcagctgggcgaagcgctcctcgtccgagccggcctgatgttctcgatgcgggtcagccggggatcgcttgcaagtgacaaacgctagtaggagaagggcgtacggagcggacgcgccagaggggatcctccttgcctgactcccagatgcggaaggcgagcaggaaccgggcgagcgacagctgttcaacaacccgtaaacatcgggcttgaagcgcagccggagaaggtgccgagcgacgtcggatggggagctgtgagcggcaaggtcaaggtctcgatcagcaagaggcaggttgaggcgatcagtagggattgaggacgagcgttgtagaagaggtcgcgcagcctgagcgtcgtcccctgattgcgcgctcctgcggcagagggtccatcatggaggacagtacctccctacgaggaggtgaggaaggtcagcttgatcgactcgcagtggtcggcgctgctcgaggtcgcaccttgacgatggtcgtccgcagtgcccctgtcgtccggtctctgccctcgagctcgagcaagctgacgcgcccgacgaggccgatgccttcgcccgctgcaagctggttgtatgctgctgtctcgagtccttggccgtcgagctggatcgtgacggcccacctggccgggtcgagcgtgagcgacagctgcgaggcagccggtgcgaggtcgagcaggtggcggaggaggtacaagagcgtcgccgggagtgacggcaggagctggctcgcccggaggagcgagacggtctggaccgtaagcggcaggattggcgcgggtcctgaatccatgaggcaaagggcgacttgcaggaggaggaggaggtcgagggttaaaggggtcgccgtcgagggcgagctcgtgcacgagggcaggccggcttgacgtcggctgaatataacctcgacctcgacccgctcgaccctcgccaagcgaccgacagctatattgtcttgcccgatgtcgacgctctcgtcctggacgtcgcacgtgacggctgagcaggccgagcaggacgcccgtcagcgggctgaggacgaccgtctgctgctcgtcagtctgtcaacacccgacgacgggacaccctccccgtcctcctcgtgcatacaggctgacctcctacttgcaacatcgctgcaggagatcgcggacgcccgtcgagcgcgtgagagccggcgcctcgccaagtatggccgggtaggcgaggtcggcctgtcgacagaccgctcgctcgccagcagcagcggctcaggaggcccgtcatcccgtactggtctgtccgctgcctctcgttgacctggcccatgctgcgtgcgcacgctgaacctcgcctgaacctctaaccacaggctcctcgtcagctcgctcctacgctacgacgggagcggccgagcggccctcggtcaacagcagcgccgccgccgcgtccgagcccaagagcaggcgcgtcccgttgcctcgacccctgtcgctcggcccgaccttcagttcgtctgccggcaaggagaacccctcgccgccgctccgctcagccagcccgacgaagagcttgatgagcccgagcatccagctcgcagctcgcttctttgagccgtcgacatggcaggacgttgacgccccgccggcgcctgcgcgcgagcccctcagcccgaccaagagcaacgtgagcaacgcctttgctttcgccgagcctgcgccgccggccagccgcaagcggcttacgcaccgggcgacaaagtcttttgcgtacgtcccgtcgccggctcgtgccacaagctcatcatcgccctcaccgccagcgacgctcgccaaagcgccggcctcgcgcgccgaggtccaggcgcttcgggcttcgcctgcgtcttcccgtccatcatcggtcgctggctcgtccaggatcttttcgagcagctcatccgtcgcgcgcgcagagctggcagcgctcgcgtcgcccgccaagtctgctgcccgaccggccgctcgagacttcccctccgccgcgtcgccgtccgactggatggcaagcccctcggcaggccctctgtcgcgctttcggaccgaaccgtcggcgtcgaaagcaagcggcagtgggccagtcggcggcggcacgcccaggagcatccgggacatcatcgcctcgctccccgtctcgtccgagccaaccgcccttccctcgacaccgggcacgccgcgccggacgcacaagcgtgcagcgcagtcattctcgtacccgctcgtgactgcggcgccggtggcttcttactcgactcccagtggatctgcctcgggtagccggcctactgccgccggctcgacgaccgcctcggcctcgaagccgaccgtcttccgtccagcgctcacgccctactcgtcgacgccgagcagtcgagcgctcgcctcagaagagcgtcgaccgggatcaccgagcgtcagggacatcatcgcgtccttccctgcatccgggaccggggcgacctcgtcgccgctcaaaggcatgccgaccgcgtcgtcgtcgcagttccgacccaagagccatcagagagcgagcaagtcggtctcgtacttgccctcgacggcctcccggctcggatcttcgtcaaatggcagccagcttggagttgcccctctggccgagatcgccagctcctcgacccccgctcgcaatgacagcgccgccgccagacctcgttctccatctccagtgccgcaaaaagtgattcctcaaacggctccgacccgtgcaacgccagcagtcgccatcgtcgagcagaccgagcgtcgcggcataccccactcgagcagcttgacgcgtctcgccggcagaggcctcgtcgcccagcgggttgcgcacgtcccgagcgagctcgcccgacactctgtccaagagcgcttgagccccgggtccgatacgtcgagctctcggctcgagcgtgggccgtcgatccgcaggcagcctgagcggctggcgttgagagtcggtagcccgacgaagcgaccgagtgacgccgccattttggtcgagagcgcgccgtcctcaaatccaccggagcaggctcctgattcgaccgtccagccggcgagcaggtacctccgtgggcctgcgctgcctgggcttgcagacgcggcagccttcggtcacacgtcctccggtcgcccggccttcaacgtcggcgttcatcagccgaccactgctagtccctggaatagcgagccgagctcgcctcctgtccagagctctgctgtcccatccagacttccggcagccgtctcccctcgtctcgtcaagctcccgtcgtctccggtcaagacgtcgttcgaggtcgttgtcgctgcgccgatcccactctcggtaccggccgctgctgaaagcctgccatctatcgctagcgccgaagcgtcgtcacccgtcaagctcactcacgtgcgtctgtctttaacgctgactcgcgccgactgctgactctccactcgacctgcagccgactcgcatgcggccgaagcgcccaatggccaagaaaggccgcatctcgatccctcctgtcatggtttcgcccgctcgagttccagctccggttgccgtagcacgcgtcacctcgcaaggtcgacggccatcaggcattgccgtgccggcgcccgaggacaaggaggagccgatgcagcaggtcgtccggtcgccgcctagctcgtggggcaggcgcgagggtctcagggttggcccccaacgggaccggcagagctcagacgcatcgccgcaggccgactctgcccgtgagtcgagccgccttttctgccggaagacctctgactgaccctcttcctcgcccttgcagaatcgactcagatgaagttcttcgtcgccactctcctggccgagtcgagccttgccgcttcctttacccgctcgccgaccaagctgccactctcgaccgacgtcttcctcgtctctgaagacggaggagtgacgccgatggcgctgctcgcgacgaacgcccctccggtcctttacgacaccgagctcgtcgttgtcgtccaccgcattcgggacggcgagactaagctcgtcgagtccaaagtatgggcctggaagagcagccagtggccggcatgcgtggtcgcggacgcgaaggtagctgagctcggccgtcggtacggcgctagcgtggtgagttgcggcttgatcgtcgaggaaggggtcgctcgcgctgactcttacccttgtcgcttgcaggttacctgctcgcaatggtgcgagagcgccgagctcctcgacgtcttcggccgacgcctcgtcactcgccagggttaccgcgcctactttaatccggacgacacagcgctctacgctgtccgccagtcgtttggctcgcttttcatcgaccagatcgatgtcgtgcgttcacctctgacgtttgagcccttgacgtgaatgctgacgttaagccttttacgtttgcgcctcagtcgaccagcgctttgacttcccgccacccgctcatcctcgtaatcatcggccagaccttcctctttacgcccaccggcacactcacctccgaacgcatcctcgcccgcgatttcgcagccctcctctcccccgatgccggcttcacagagtttgcaccgggcgatgacgcggccgacgatccggcgtcgacaggcctcttttggatgtgcttccgcgaagaggaggcaggcgcgtcgactgttgcgccggcgatcgcggatcattggcgcttccggccgacgctcgaaggctcggacgatctgagggcctggacgatcgactgcaccaacgaaaactcgcccgtgcgtcttgccgcaacgtcccgcatgctcagagaacgcggctgctgacgtcttcacccacgcactcgtcgcaggccacgccgatcgacacctgcggctcgaccggtgccgtctttgcgccgcaggctatcaccgtcgctctttgcctgctcgagctctttgtcatcgtcggcgccgacgcccgcggccggacggccgacatcacgtttgcgcttcagacggctgcggtgcgtcattgacaagcctcgcctgacggcgagccttcttgctatcgagctgctagcgaatgagtgctgaccttctcatcccctcaggccatggcgaccgcgcttagccccaaccggcccttcctcccaccggttcacgcgctcgtcatgccctcacgtattccggccgatctgctcgtttacctccgagacggcatccctcggtcaggcgacgtcgtgcgtctctagacctctagcgtctccaggagcggcgcatgtaaaaggcgattactgatccgctcagcaccccctccatcagtctggcgccgccgccgttgacgagcctcaaatctgtatgaacctcctctcgttcgaccaggcgctggccgacctccagacgctcgcctggccagcgcacaggcttgccgacgacaactttctcccactcggcgtcgctccgtcgaccgccgccgtcacgaccggcgctcgataggatttgtttgaggcgagcatcattgacactacacccctctgccgccaccactcttcttcgacctgtccctttaccatccctcaactctacgactctcccgctttgccctttcacgatcgcccccccccccttagcgcggcctacgaccaatttctccccttccgcctggctgcgatacgaccttctgacccctttccttctcctactggcttggacgtcggggccggtcggacgtaagacgacatgtttacaacggagtggagacacctccttctcctaccctccctgcaaatcaaacctacacgcagatgtcactcaagactgtcgcccagggttcgtccagcttcctcctcctcctcctcctcccaacgagggcttgcgcgtcctccccttctctcacatctacggcctattcaagctcgtcctcatgcctctcgtccacggcttcagggccgtcgtcgtcccgcgcgtcgacctccggacgatcggcggcgcggtcgagcgctgcaagccgagctgcgcgattctcgtcccgccgattctggtccgtcccccttctctcccgcgcgcgcgagggtgagcgaaagggaagacaccagctgatttgagtcgcttgcgtgatacaattcctggtgtagatccactttgcccagtcgaaagcgctcgaccgctacgacttgtcgtcgctcgactggctcctctcgggcgcggcgtacgttccccttgaaccctatcacgatgtctcgctatctcaactgacggccctattctttttctttcgtctgcccaggccgctcgggaaggagctcgcgcaggctgttgaggcgcgatttgcaggccagaacttaacgctcctccaagggtccgtccgtctttcgtcctttctcgagggcagcgcgccctctcaccccgagtccgtgctcacgctctcggctcgtttttgatcgagcccaggttcggcctcaccgagacttcgccggtgacgcacatcctccagctgaccaacgctcgccagcacccgggctcgatcggccagctcgtcccgaatgtcgaggcgcggcttgtcgacgagcatgggcgcgactccgttgggacgaccggggggacggcaaagtggcccgagggcgagctgtgggtgcgggggccaaacgtcatgaggtccgtcgtctctcccgttgccgtcctctcctccctccctctccctctgacacgcgctcttgccttgccggcgcaaaggggctacctccgcaacccgagcgcgaccgaagcgaccttcgcatccgcggcggacggcggcccgcgctggctcaaaacgggggacattgcgacggtggatccggagggctacttctacatcattgatcgaaggaaggagctcatcaagtacaatgggtgcgtgctggctcgacgctgtcgtctcgcggctgaggagtgacgcttctgacagcatcgaccaactgaccgaccaaaactctgacgacacaacgtccgctcgcagacaccaagtagcccccgccgagctcgaagcgctcctcctgacccacccgcaagtcgccgacgtcggcgtcatcggcgtccagagcgccgaggaaaaggtcgaagtcccgcggtgagaccgttctgctagattcttggcggctggatgcgctcgagctgacgagctgcggcttgggtttggggcagggcgtacgtcgttttgaagccagaggccgtcgagcccggggccgagcaggatttcgcactggccgcggttcgatgggtccaacagcgggtgcgtctctttccgacttgcaggttgcgatcgagcgacttgctgactcgctgtagcgccgctcttgtcgcaggtcgcaccgcacaagtacctccggggaggcgtccacctgatcgaccagatcccaaagtcgtctgtccccttcctactcaagctgcggattcgcgagggccggggactgacgtcgtccttgggcgcggcatctcggtaggccgtcgggcaagattctgcgcaggaggctgcgcgacctcgctcgagagggcgagaaggccagcggcagctgatgatcaaccaagcgatggtcagaacgtccaggctagcgtttcgccgagcgcagattttaacgaatcacgacgtccttcgacacttagttcgttggccttcgtccgccacccttctgcgactgccggcggctgctctactggcgggtcgggagacgctcggctgccgtccctcgcaatgaccggtctcgccacgacgatgctggcagcccggcgccgggcaagggccgcatttcttgcgctccaacggcactcgactgccttccgcttaacctccttcttcttgcgctggtgcggtcggaaagccggctagcgctcaagtctcgttgctctcgatgcacgcctcaacgaaccctcgcttgagtcgagcgtagaacgaaagcaagtgcgagacagacatatagagcgggtcgtgttgggtggaactttgtaggagaggacgagcagcaagcgggggggggatgtgctcaggcgtgccggagcggctcgccccgagcgagttcgatgtcgctcgcaccgggcccctgcggcgtctggccccaggcggtgaggtcggctgcagtctgtccgatggagcgcttgtcaggactgggcacgaggcaaagaagaagagccaggccgcagactgaccttctgcgagggcgtcgtcgcccggtcatgctttgaacggtaaatgacggcagctggctttgaacgagcgaccgacaacatacaaggaagtcagcggtcgagcgtctcgcgagacaaccgagggaacatctcggccgcacctggatgtggtcaaagtgatcgggtgtctcgtcatagttgacgtgcgtctcgcgtgaaatggcgacgccgtgctttgagccaagaccgtgctgcttgcccgacaaggcgccaaagcccgaccggccgccgttcgtccgcgagagctcgtcgctggccgtcatgcccgtcgcctggcgccggttgaggttggcgagcatcgtgatcgagtagatgcggccgaggaccatcgcgatcatgatcgagaggttggtgttgggcaggacgttgtacaggatcagggctgcgatggcgaggacggccgtaatcgagcccgtctcgaccgcctggatcgacagccggcggatgatgctgaggaggggaagggaggggtcagtgatggagtaggacaagttgaacgcaagcgggcccgcacctctgcgtgtcgccaaagacggctttgacgcgtcggagctgccaaatgcaggccgcggcaatcatgacgtcggcgcccgccttgaacgagagccagagcgtgacgtagaacgtgagggtcgcacgtgtctcgagcgtgacggtaatggcactgtagagaaggcagagtcagtcaagccttgatcggcaaggcttcgcaaggaagacgcacccttgaccggtgaggaaggcaccgataacggagccgaggatcggaatggcgaggatgacgagcagccaccactgacgtgagaagcggtagacgcgccaggcgaggtagatctgacagatggcagccgagagagcgacggcgaagaggtagaagctgggttgatcgcgggacagtcagccgaagcaaaaggaaacgaggttgaccacaggacgcacgggatgggccacggctgagagagctggtatgctgcatcaccccagtgcgcgatcgtgtacatccagatggccgcaaagacgctgcagcgggaccgaggaaagaagagggagtcagcggacaagcgagggaggctgcttttcaggcaaggtgtacctgattacggtcgcaatgtcgatgacgagcgccgcaatgactgcgaacttgtaggccaggacgtcgtccgggaattgccgaaagtaggtgatgcagccgaaaatctcgatggccaggagggggcagctgagagaagggaaacgtcgatgagctgtcgtcgccagctcaagctgccggtccaggggagagaaagcgaggcgcgctcacttgacccagctggcgatcatgatgcagccttgtgcgagctcgaacatgatggagggaaggcggagggtgaagggaaaagagtgtcggtcgtccgttgaagaggtgagagggcagagggcaagccaaaggaaggaggaaggagcggagggcggagagcgggtggcagtcgagcgaaggaaattcccttcttccttgccgcaagctctccttcatgaagggtccgctggtcaggcggtgggtggcgtccctccgtgaaagggcccttcggctcgtttcgagtagccggccgacagggacgggccatcaaaggccacgtcagacaagcgtggattcagccgaggtctccgccccctttctagagcgtttcagccacagccggcccgagggacgccttgtacgtcgtcgcctcgtggcccggctagagctttcgatcaaagggcgccaggcaaatggcgtcggtcggccgccggtcttggacccgataccgcttggtgagcgaccgtctgaaggcggggcagccgggttcgagagtagtaggccgagtcgcgggtggcggtcggccggttccgtcgaacgagctcgagtcgtcgtctcgtcttggcccttgccagccttgccagcgaacggtcaccctcatcctgccagccatcggcccatcgcgctcctccttgacgtaccagggtgctcagcatgctccggccgctctcgctcgtcgctgctcgccggtcaatcgctgctggcctcggccgccggctgctcgccacgccgccggcagcgcagggagaatcgccacagccgctgaagctcgccatcattggtgccgggccgtcgggcctatacgcagcctcgcgaatcctcgctcagctgcctgccgacgacaagcagtcgcaggtccacgtctatgagcgacttccggcaccgcacgggctggtccgctacggtgtcgcggccgatcacccagaggtcaaggtgcgttcagccggctcggagctcctcctggtcccggagctgatcgcctgcccttcctcggctctcccagaacgtccagcacaagtttgacctgctcgccaacgaccctcgcttcggcttctacggtaacgtcgccatcggcgccgcgagctcgcccccagagccgaccccagccgctgcgcccgccgcgggcagcagctactcgtacccggcggccgtccggctgccactcgagtcgctcctcccgcactactcgcatgttctcctgtcatacggctcgtcgctgtccgcccctctatctcacacgccgggcgcgtcctcggcgccgaagccgctcgcaaacgtctacccggcgctcgccttcgtgagctggtacaacggtcacccggcctttgccaagctcgcgcccgacttgagcaaggtcaagcacgtgactgtcgtcggccagggcaacgtcgcactcgacgtcgcgcggatcctgctgaaggacgccgatgcgctcgcgacgactgacctgccggagcacgtgctcgccgtcctccgagcgtcggccgtcgagacggtcgacgtcgtcggccggcgaggtcctgcccaagttgcctttacaacgaaggagttccgcgagatgctcgccctgccagacgtccgattcgaaggcccctcgcaggccgatctcgacgaggcgctggcggaggtcgctcgggtcggcgggagcgaggagcgcatgcgcaagcgtctgctcggcttgatggcaaaaggctcgtctcccgcatcaaatcgaccgagcaagaagttcaagctctcgttccttcggagtccaaaggcctttcttccgggtactgccgtcgaaacggggcaggccggatcgacctggccaccggtaaagcgcgtcaaatgggcactgaatgccctcctgcctccgccaacacacgctccgtcaacaactggcgaccctcccaacacgcctgagccgtcgaatcctgtgtcgacggcagtcccgacgggcgacgaggtcgagacgacgaccgacttcattgtcgagagcgtaggctaccggagtgagccgctgcacttacggccgggcgaggctgaggccgcttggcccgagggctggtttgacgagcgcaagggccgggtccggaacgttggcggccgcgtcgtctcggccgagggcgaagttgtgcgttcctgcatatcgaaaaactctctgcgcgcgctcaggctgacgccctttcccgcacggtctgcaggtgcccaacgtctacacctcgggctggctcgcgcgcgggccgatcggcgtcatcgcccaaacgatgtacgattcctactctgtcgccgacctgctgctctcggaccgtcaagcggcaccggcgacgctcgcccacccggtgcgcgagggcgtgccggccgagctggccgaggcgagtgcgggcggaagggtcgtcgactgggagtcgtggaaggcaatcgagcgggtcgagagcgaggagggggcgaagaggagcaagcgggcggagaagattgttgaggaggagcggatgctcgaggtggccaggcaggcatcggcggagctggatcgatagcgctttgaccagcatctgtgtgcgtcgagcaagagaaatgccggggcacttatttggcagggcaacaggccgacatgctcaacgctgctgctgcctggtgcgttcgcctgctggactgcgaggtgactttgattgctgatggaatcaagctttcgggcagaatgtgttcgatacagtctctgatcgacgtcaggcccaatggcgacgcgagcggttgatcaggcgttctctatgccttgaggatcttggcgtgccagtcgacgtgcgcatcaacaaaggacgagatctgctccagacggcaagaggacgtcagttgcttgaggcaaggacgctcctcagagaaagagagagagagagagagggaggcaaggaggtctgaaggagacggacgcacaaagtagtagctgtggtcgtaaccctgctcccgctcgaccgcaacctcgttcgtagaccagccgagctccctcgcacgtttctcgaacgcctccggccggagctggccgtcgttgtagaactggtcagccgtgccgtacgttaccttgatcctgagctgtccagcgccgccggccttcttcttgtgctcgtcggccgagggcaggagggcgagcgagtcgtaagacgcccattcagagggagaggcgaggtagccgccgaaggccttcttgccccaggcgcactctgacgggttgcagattggcgaaaaggccgaggcggccctgaaggtcggcgaggacgatgaggacgagggctgctgcgtttgctggcggaggtagagtgagagtgcgccgtggccgcccatcgagtgaccaatgagcgagactcgcgaccagtcctgaggaaccaacgagcagcagagagcgcatcagcgtgccggacgccaaggaagtctcgacggtcagagggaagctgcgcacgattggaagctcggcctccttgaggaccgccggcagctcgtcgacgacgagcgagcgcatgttgtagtgcttggaaaacttctcgaccgtcgcggtcaggtagaatccggcgccggtgccaaaatcccaagactcgtcctcgccatcgacgttggcgccccggggcgatgtgtcggggaagacaacggcgaggccggctgccgccgccgcgcggagaatgcccgacttccagggtctgcaacagcgcagaggatagtatctgttatgagcgatgtgcgagagatgaggagcagagaagggacggacccggtgtcctcgttgcaagtcaggccggctaggtagatgagcgccggcgcgggcgtcgagccggtcgcggcctccgggaggaagacattgatctgcgtcgggaggccgccgagagactcggactgcggaggcaagggaagtgtcggatcagggtactgctaggacagaacgagtcgaagggagccagagccaggcagcagatggtcgagcaggtcgtccctcgatgacgaggtgcagcaggggttggccaggccgggcgactagctaaacccttgtcaggccaaggcaagcctccctcgctcaaagctggagacagaaccaaatgcataccaggaggagccgtcgcctgcccgccctggcaggtctctagctcctgctcgtcattgagggctcgtcgaaggggataacgcgcgcgtggtcgaacacaggtggaagacgggcgagacgcacctcgaatttgtacttggtgagctggccaccaaaggccttattggccgaaaccttttcgagtgcgggcatggctgggttgaaagtaatgccgggaggaaaaagagcaaggtgacagtcaagaggagcttcggaggtcgcctcggtcgcccccttttcggtcgcccgcgacgcccatgtcgccgtctccttcgcctggcgagcccatcttacgctcagcgacctaggccaacctgctctctggccggtcaactgtccttactgcagccatgctgcgggtccacgcgatgtgagctccggctcggctcggctgacgtccggcgagctcctgcttgctgaccctctggaacctgccctctcgagaacagaggcattggcgccgtcggcacgctcctcgctcatcagatcaagatgcacgtcccgagggtcgatctgacgctcattcttcgatcggaggccaaactagaagccttccagcaggcagaatcgagcctctcggtcgccgacgcgacgccagcggccggacgactggcaggagaggcccagcgacaggctcccgtacgactggcggccgaggcagccaacgacaagttatgccccgaaaagccaatcacgatactcctatcaacgctcaaggccccctcctgtctgcccgcgcttcgacaggttgctccccggctcacacactcgtcgaccgtcgtcctcctccacaacggcctcggcgtccgcgaggaactcgttcgagagctctggccagacgaggcccgccggccgacgctcgtccagggcatcacaagcgctggcgttaggattatcaagccgttcagcgttcagctcgagggccgcggcgcctggacgtttgccgtcgttccaacattggcgtcgcttaacgactcggccgtcccgccagcctcacttgagtcgatgacgggccttctggccgcactgggacaagcaacgaactctttcgtcactcctcggctcgtcccttttgccgagctcgaagaagcagcgctcttgaagctcgccgtcaacgtcatcatcaaccccttgacggcgctcttccgcctgccgaacggcgcgctagccggcaaggactttgaatcgctactcaaccttctcattggggagacgtcgatagtccttcgctctctgatcgatgccgccggccggccgctcctcgctccggcagccttctcgaccgaggcactccaagcggccgtcctcgacgtcgcgcgcaagacggccagcaaccgctcgtcgatgctccaggacgtcgaagccggccgaccgaccgaggttgactacatctcgggccatctcgtcgggctcgctgccgaggctggcaagcaggcgccgctgaatgcgctgctccgggagaaggtggcctcgcttggcgctggagcagcccctctgacggttgccgggcttctgcgcgagtgtgagttgtcattgagatgcgcatgaccagctggtgaggcggtgcttggccgtaaaggggggtcgtgaggggtttcgtttacatgatccgccgtgagcgcgggtagggtggcagaggggaggtgcaagatgaggtgcaaggtgagagaaagaagagggcccagggaggacaggtagccaagtgcaggagtccaaagtggtacaagaggaggcggcacgatgcaagggagcgagactgagagagcgcctcacgcgccctcggttagtgtgtgatcgacaaactgcatcgcctggtctttcgtgatcgtcttgagcgtcgagaccttctcgttgctgaaaacgacaccatacgccttgtcgcaggtggcgatgagctcgggccggaaggctggcggggacaggatagggtcagtgtcgtttaccagctgcgggcgatcacgttgcggcgagacgcactcgtcgtgataaactgggcgttatccgagagctcggcaatcatacctgcgtgcggacgcgggcaactaggcgtcagtgccgggcaaagatcagcggacgggtgcgataagcacggaccggcaaccgacgtgcggtactgcgcgtcgaggttggcgtcaatctcgtcgaagaggtaaaagggcgctgggtcgcagcgctggatgctgaagacaagggcgagcgcgacaagcgccttttggccgcccgacagctgctggatccgcaggccctcgtcgctcttcgagttgaacgagacctgtagcaagaggaaggacgcctgtcagccctggacaaagcagcgcggtcgatggcaacgacgaaccttgatcgagacgccggtgtagctgtcgatctttgaccgctcgtcgtcctcgtccatcgcatcgtcgtcaaggtcctacgttgacgaggagaagtcagcgagtgaggctcgagcgatgggcagcaggccgactgggagaggacgcacggcattgtccgcgcgcttgttcatgacgagccggccacggccggcaggaacgagcttctcaaagatctcgccgaagtgcttcgagacctcgccaaatgtgttttcgatcgcggcatccttcttcttgtcaaggttgcggatgagctcgtggatcgactcggacgacttttccatctcggtgaagcgggcgtagatgtcgtcgcgctgggcagagtacttttcgtacatctggagcgccttcttgttgacgtgcgaaaacttgccaagcgccgtcttgaccttgtgcagccgcttgaggagctgttggggagcggcggaagaagaagaaaggagggtcagcgtgattgccacgactaacttacgagggcaggcacgcaccctggtcgagtcgaggtccttgtacttctcgaaggcgtcctcaggcaggacgccgaggtcacggatgagcttggtgcactcgtccttccgctcgagcagcgtctggcgcttcgagatgtagcgctcgacgaccttctgtgatcgggcaatgccgcggccgtcctcctgctgctcggccttgatgcgctcaagctcgtcattcgtcgtctggatttcggtctcgagctcgtccttgcgctcctcgttggctgcgggcgggcaaaggacgggatcagcttcgacccgtctgtggcaagcggacccgccgctgcaagcacgcacctttgatctgttccttcaggtcgtcgaccgccttctttagcgaggccacctcgcgcttgcgggcatcgatgtcgtctgccgtctgggtcgcgccggtcgccggaaggttgagcgactcgatctgggcacggaagccgtcgcgcttgcggatcaggctctcaaagagctcaatctcgagcgcattcttgcgctcggtgagctgagaccagacgagcgatgaggcgtcagtctgctgagcagtcgatcgctcctgcacagaagcaacgtacctcagtccggtccttcgttttgactgtcagctggccttgcagccgcttgacctctgcggccaggtcacgcaatagtcgctcctcctcgtcgctgagcgcgctctccatcccggttgccatctctgcctgaacggcgtcaatcttgacccggagcgtcgccacctcgccctcggcctcctccttgtccttctcgagccgttcaagcgcgcccttgagccggtcttcctcggcctgcgcctcggctagctcagcgaggagcgtctcgcgccgcaagcgggcctgcttacgccgcgcgtcgagaacctggacctgaccgatcgtccgcgtcagctcctggtcgacgcgactgatcgaccgccgaacctcggcgaggcgcgccgcatcggcctcgtgcttggtccgccacgtccgctcggttttgatgccctcgagtcgcgagcgccgaaggtcgtggtaaccgccggtgagcgaacctttgcggtcggctcggtcgccctcgagcgtgatgacgttaaggccgtgcgagcggcggtaggctgtcgcgacgtgaaggtcgtcggcgacgatggtcgagccaaagacctggtgggcgcgcaaaacagtcagccacgtccttgtccttcatctgagggctctataacgcacctgctcaaaggccggcgcatggagggcatcgaactgaagcttgcggatgagcgggatgacctcgtccgactgagggtacgtatgcggcgttgcccggacgcggttgagtgggacaaacgtcagccggccaagtcgctcggcgttcatgacctcaacgagccgcgaggcggtcgcgtccgtgtcgacgacaatgtggaagagcgaggtcccggccgtctcctcgacggcgagcgagtacttttccgagacggtgaagagcttgtagagcgggccgtagacgccggcgaggccgagccggtctacgatccggtcgagcgccttgagacccgaggccgtgtcgcggtccatcgtcgtcgcgaggtgacgttcggcgcctttgagctcctcgcgcgcgtggtgagccgtgctctcgaccttggcgtcctcgcgccaaaggtccttgcgctggtcggagagccgtccctccttgtcctttgcttcccggagttcgtcagcgatcgcccgctcgtcggcctgcgtgccctcgaccgccgtcctcagcgagcggctctcggcctggacgtccgccaggcgcttgtgcgagtcgtctgctcgtgcgccaagcgccgctgccttctgcgccgcctcggtcatccggctctcgagcgtcgaggcctgggcggcgagaaaggtatcgcgatcggcccgcgtcgagaactggccgtgtcgggcctgcttcgcgtagagcgcgtcgacccgtgcgctctcaccgtcgagctcctgtcggacggcgcgctcctcggcaacggctgttcgccaggccggctggacctcgccgtcgagctcagcacggacgacttcaatccgccgctcgattgtagcgacctcgccttcgagagcctcttggcgttcggccgtcgattcggtcgacgacgtcagatcagcgacaaggcactcgagctccgtcaatgatcggatcaggtcgtgcatctcctcctgggatgaagttgtggagacggaaagcaactcgagctgctgccggtgctcgctcagggccgtctcgagctcctgtgacaaaggggaagtatcgcagtcagtcgacctagtgaaggaagcggtgcgcggaagagggtacggacagtgatgtgcttctcgcgcgcgacaaactctcttcgccgctggtttgacgagttcatcgtctgattccgctcggcctccatctgctcgggtgcggagggagagggcggtcagcgctttgaggcatcgatgcatgcgacgctgggtaacgcacgtcgccgagcgtgccagtgatctcctcaagctcgccctcgtacatggcgtactcgagcgctttgcgctcgcgctccttctcctgaaagtcgcgcagctcggtcatctcctcctcgaggtcgcgcagccggccgtcgacattctcgagcgtcgacgtcatcttggcccggcggatctctgtgcggatggaggagcctgcgtcagtcgagcaagcctgatgcctggcagaaatgagaagctccgcacccgccgcgttgagcgtcttgagtgactcggccttcttctcgtcgtagagggtcgttccggcgacctccttgagcaagtcgagccgctccttgtccttggcgttcgtcaggaaggtgatctgcgagcgacgccaaatgtcagataagcgagccttgtgtgaaggatgagagtctcgagagaacgcacccgaccctgcggcacgatgtagtacgggttggatcttgagaagccggcactctcgagcaggttcatgacctcggccttgctcgagctcttgcggtcgacagagtactcgtccttcttgagaccaattgtccggcggaggacgacctcgtctcgcccggtcgggaaccggccgtcgtcgtttgcaaagactatctcgacaaaggccgagagcgtcgtcgccgtgctcgtcccctcgtgaaggagcgcctggcggtcctcgcgcgacatcgacgtgtaggcatccgagaggacaaagcggatcgccgagaagaagttggacttgcccgaaccgttgcggccgacaacgacattcaatccgggcgaaaaggcctcgagcggggtcgagtcgcggtacgacttgaagccctggatcgtcaatgtcttgatgtgcatgacggcggcggcggcggcggcggtgaacgctgatgagctgaggcgcaaggacgggtgtcggtcggaggtcggctaagcccaagcgcggtggttgctgtctctctcgcgcagacgagagcgagggtcgaggcgatggtggcgggccgagggaagggttcagggcaaggcaaggccaacgagcggcagccgcgacgcgtcgagctcattcaacgcgcgtcgagcgctcagctgaattccgagctcctcgcaacgaatcaagtatcgcctgcgacttcggcccctttcttgacccactcgacgacgaccagacggccagctctttgaaggcaaaaaggatggatagcaaagcctacaagccgagcgtccacgacaggcttcgctctatcgcgctcgatgctgcttacgttcggtcggtcgcggccgccaacccgtcgctcgcggtcgtccccaacctccgttgcggcgagtggtacgtctcgcccgagctggccggcagccggcaggcgtacttcaagagcaccgatgggcacacgggcgagtgggacttcaacttgaggagggcaaatatgcacctccttacactgatcgagcagattggagggtgcgtttctctcgccgccctactgagctcgagcttgggctgacaccttaagctccggcccctcgctcaccaggctgatcctcatcgacgccacacggcgaggcaaggtgagccgtcgcatcatctttcagctcacctatcacgcgcctgattcatgctccatttttgccccctccaccagcgcttcccagacgcgctgagcaagacgatcccgctctggtgcgcgaccatcaaccgggcgtgcgtgctgcgccgccaacgaacggctcaaacgaccggctccataagactggcgtcggaggccgaagacttatggcgagcagaggtcatcgtgccgagtcaaagcgtcggaaaaagcgagcgatgggacatcgagcagcgggttgacggctgggccgagaagctcctggtacgtcccaggcctttgtcgtgatgccttgacacgctccgtctgacccgccgtcttcatctcgtccacccgcacgccaggcctcgtcccttccactcccagagctcgccctccccctgcgcccaatccacctctcacccgccgacccgctttcgaccctcgccccacccgcaacgctcggcttctacccgattgtctgcctctctgcctcgcgctacatcgcctctgatgccgagcgtcagatgccggccgacgtgtggcccgacggtggagaggggggcgaggcatggcgctacgagcagggtgcaggggacgaccacgagctttggagcgaggggctgacagcacggagcttctggcgagggatgccgggggggtgggagaggctcgcaaagagagaggtcgagcggcttgctagggccgctgtcgctgctcggtccggcgttgacgcgccggccgacgctgtcgaaaaccgcgtgtcatcagaggcggctgaattggagggcacggtagacctcgtccggccgacggctttgatccacctggcggccctgccgctctcgcccgccatagtcgccaagtacgcctgcatcgtcctttccacctcagcaaggcccgtcaacgctcctcgcgccaatcgagaccctgcctcgccgccgacgactggccaggacgtccttccttcttcgcagctgctcgtcatcccgagcaagccgcccaaaacgactctcccttcccctcaagcactcgaagaagcgatcgcctttgcctcgcttgcgatcggccaagggcagcgagtcgtcgtcgcctgcgaaggggggacagacggctcggtcggcgtggggatcgtgttgcttcaggcgctgtttgacgacgaggggaggcctaggtcagagtcgggcgttcttggtgggtcgctacaccttactcttacaccgaccgagtgtcgcgaaagtcgggcttggatgcgcccctcgactcggctgaccttcccactcatcatccctcagagcccccaccctcaaaaaagacgctttcgacccgcctccaatgggccatcaccgcccggccgcgggccaatccgagccgcaagacactccagcacgtcaatcagttcttcctctcgggcgcgcatcggccggcgtcggagaagggggcgggagaaagcttggtgtcgtaagaagcactcgcgctgaggccctgtatcgttatgtctggccgagcttatgcctggactacaacgcaacaccgccggagctttcagcaagagcaaccgctgcttggcggctcaccatcaaacacacggcgaggccgttctaagagcaggagcttgaccgtcatcgtttggtcggtcgccagcccaatcgacggccggccggatcgcgcagaccgacccgagagtcaaatactggcagaaaagtcaggccctcgcacgcacgctcgacgcgcggtctcaacccgccctcgcacgcacgctcgacgcgcggtctcaacccccaggccgctttcctttcttgaatgccttagcagctttgccaggtcgagagcagcaccggtcgagcaccagtagacggtcgaggcaccggcctcccgagcccttcgttgcgtgccgggtcgtcgtccctttaacgactccaaagcaaaatgggctctaatatgcgcttcgcgacgttctaccaatgacaagaagacgacgggagcatgaagatcagacgatacagtttggagcaagcttgggaagggagagagggttgaaaaaggggcaggtcgagccgaagaggcgagggctgggcgaagcaaggacaagtgacgtccagcctcagcctaccctccggttcgacaactggccagcctcttcacttgctctccttagcggcctgcttcggcggcgacgggtccgtccccttctcggcgatgtgctggatcatctcgccccggccctcggggacgttcatccccttcttgacggcgtcgcgggcccagacgcggtcgagccaggccttgacggccggcggcagcgaggcatgctcgatgccggccatgggcgaccagaagacccagggctgtgggcgggggcgggcgcgcagcaggtcagcagtcgatcgccccgttgtgacaggcaacggcgagagaggacggacgaaggcgttgatgtcggcaatcgagtagcggccctttccctccccaacgaggtagtcgcggtccttgagccggatcgcgagaacgtcgtacagccggcgcgtctcgtccatgtagcgcttgatggcgtaaggcgcccgggcctcctcaggtgcgtagcgcgagaagtggttgagttgcccctgaccgcgtgtccaaaaagagaagagctgagcgtcagtcgatcggttcgaggtagggccaggggaggagaaggggcagggaggaaaaggggaggggagggaagaggaccgacctgcatcggcccgacgccgcctggacgaccagcagatgaatcagaaccgtcagctatcatcctcctgtaccacaagagcgaagaaaagcgcgtaccgtgaatgaagaagagccactggagcacttcagatcgatagtcgtcaccgttggtgtcatccccggcgaaggcgagggcgtggtcggggtcaaagtgcttctctctgatcaggcgcacagcaagggtgtcagcgtagagcatcccgtgcacgtagaggaggggactatactgacaggtagactgttgagccagatgaagatggagcaagagtaagacgtcagtctgggatgcgatgttcgcggggaggagtcggagggcccgggacgcacggaggatggcggccgtctcaaacacggcaaagtcgttgcggttcgggtcgacgagcgccggaatgcggccattcgggttgatctgtggaagagagagtagttgaaaaccaggctagttagcctcaatccgacttgcggcgccgatgcccgcccagccgcctcaagcaaggcgcagcttctagaaagacggcaaaaagcacgggcgagcgacaagacaaatcgcaccttgatgaaccaatcctccttctgggtatttttcatgatgtcgatcggcttgacgttgtatttgaaggccgggtaggcaaccttgagctcctcgaggaagatcgagaccttgtggccgttgggcgtcgcggcggctttgagcgagcgagcaagcgagcgcacgagtgggagcaggcaagcgtcagccgcctgtgagaggagtgggagagggcgatcggtgcgcactgtagaagtcgagcggcttcatctcggcgatgttgacctgggtaggggcgttcgaggcgggcatactggcgagtgtgcggcgggtgaggctggcgagcgagcaggcaagcgacgtcagtgaacgaacaggcgcttagggtgtcatccaggaccgactttgtcggggaaggcgtcctgcggatgagggtacggagcatgcgaaggtggtggttggcgaaaaggaagcgatgggctaacgggctgactgacgggctgagcatcggcctccgccgcgcccatgacgtgccaatcgacgactcgcccggctgggacgacctctctttctgtctgcccacaccacgccagatcggctgatggcagctcggcatgctggaccttgatcaggtctgtgctgctctcttgcgctctgcctcatgtcactttgtgggatggtcgaaagaaccatcttctgcccgccatggccgcagagaagaatccaaaagcccgttacttgacgccgcgccctcgaagctcgacgacctcggaccgcgctgctcctccatctgcttgccttccctctcacacccccaccttacccccttctacacatctttgccagccatgtcgctcatgctcaagactggtctcaagctctttgagacgctctccgagggaaaacctcacgtacgttcgaccctgcctgctgccggccatcgcagcacggcctgctcgcccttccctcggagggagctcagccctcccttgcttgaagccagcgaagctaatcagcccttgcgccctgctcataccaacagtcgtccatcaccgactgggtcgacatcctcaccggcgacaactatgcgctggacgagcttgacggcgtcgcagagctggtcgaggcagtgtgcgtccatctctgctcttcgttggcgcgctttgccggccagatggagacgagacggaggctgctcttgcctcccgttcatccggagaagtttccttacgaagtggcgtgttgactctctcccctccctatgtcctgccttctcgcctatttgtctgccttctgtcctcgctgcccgtccattctggctcccgcccgccgccttatcgcccgccttcgtcgccgccgctcacagcgacatccaaggcgcgaccggcccggacgaagcatcgcgggcacttcgcaagaagctcaagtacggctcggttcaccggcagatccgggccctgacgctcctcaaggcgctctctgagaactcgcggacgtttccaaagtcgtttgcgagcagcccgcagctgctcgaccggctgcgcgagacggcgagggactaccacacggacccagacgtcaagcgccggctgatgggagtcctgaagggctggaagatccagcatgacgagggcgaccgcgcgttcagccgggtcgcgggcatgtgggccgagttgggcggcgccggcagcaggcgggtaagtcgcctgtccttcatcagaacgtcggacagatgcaatgctgacgtctgtttcgctctctcgccgcaggcttcgaccgtcccggccggtgctagcggcgccgccacctccaagcctgcaaacccgagcgcccgcgacgaaggcctctggacgcactcgtgggacgtttcgcccgctgcggccgcggcttcgcgccagtcgtccaaggccgaagaggcccagcgccagctcgacgccagcgcgcgccgggccgaggctgagcgatcaaaggccgtcagcgacgcgaaggagcgcgagcggcgcgagattgagcgccgggagcgcgagctcgccgaccgggaggagcgcgtcaagcgtgaggagcggatgctcgctgcgcgcaagaagaatggtggcaatgccgtcgttggtgtcgcttcggcttacaagcagaacaaggcgacgccaaagcggccaccgttcaactttgagaaggagaagccggcgatcctgagctcggtcgcgggcgcttcgcaggcggccaacaacctgatcaacgcgatccggctcgtcaaccgcgagaccgagtcaatcacgacgaacgcccgcgttcaaaagtatctcgatgaggccaaggcgctgcggaagcgcgtgattcgctacatccagcttgttgaggacgaagagtacattgggacgctcctctctacgaacgagacaatcatcaccgcgctccagctctacgaccggatggccaagccggcgacgcacgactcggacgacgaggcgccgcccaagccggctgcccgcgccgagggccagaccgaggaggaggcgctcggccagaagatggccgcccagaggctccaggacgaacgggcgagcgagctcgcaaagcttcaggccaagcaacgccatgcggtcgcgcgggaccgaatgcggcggggcaacagcgcggtcggcagcgccaacctcggcggcggcggcgggggcggtgcgagcgctcaccccgacctccaggacctcgactttggcgcctcgcacggtcatcaggcggcctcgtcctctagccatgccggccgctacgacgctgcccccgcggtgtccaacaacgactcgctctctgacctgtcggactacgactcgtccgatgacgactaccggctccggtcagcggccgcctcgcgccgccagtcggtcgacaacgcctcggtcgcgacccaggacgcgccctatggtaacctgctcgacacacccggcgccgacgacccgtttgcggacccgttctttggcgagggcccggcaacgccgatggcaaaggagcgcaaggagtggtccgtcgttttctctgtctccttctagtctgagggtcgacgctgacgctcgctcctactttgataacaggacctccgtctgaacctcggcgcttccggctctgaactcttctgttataccccagccgttcaatctcggtttccgcttcggtctgctccgccgcaatccgtgtcaatttgctccgctcagctttccctgctctctgtaatcctgtctcttcttcactctccgcgcgcacactctgcttcagaatggatctgctggacttgagctcgatatcctgttgcaaggaaggggtttggagcacgacggcggcgcagtacacgcatctcagccgaggactcgagcgatctcttcgttcctccgacgacgacggcgtttcctcctcttcctcctatcccacatggcctcgacctcctcgcatgccgccggctccttcagctctaatctcgcccttggccgttcgctcgcccaccgtggctcgctccagctcctgacccaaccgccctcggcccagggggccttcagcctcttcctccaagccgcgcaggcgctgtcgctcgccgtccggcaagccgtcgggcctgtcgacaaggcagatgttcagcgcgagctgaagttggcgctcagcaaggccgaggcttgcaaggctgtcctcaagggaaaggagccggagggaaccgtccgaaggccggttgccaagggctggtgcgcgccaggtaagcatgcaggccggccaaaagcgccgacgcagctcgagccaggcactgaagtcctccgtcaacacagaatcacaggagctcgtcctcctccagtcggctgtcgtcgaaactccttggggcaaggtcgacctcccgttcgcatcgcccttcctctccgcagcctgtgcgctgccgaaccccgccttaccgacctgggctgccgagggcggctcgtacgtcccggccactggcaaaggtcggctctggcgcacgggcctcgagccagaggacgtccagcaggatcggatcgccaattgcagctttgtcgcgagcgtccaggtcttagtcggctggaacgggcgccatgggagggcgcgaggccgggtgcgtctgtctcgtccgtgcgagctgcgcgccgggtgagcaaagggagggctgactcttgaagctcgttctatccctattgtgcccctgaaggatctactccagccaattttgacgccgacgacgaacaatacagctctttatcgcctgactatccaccagaacggctgcccgcggacggtccatgtggacacgctcttgccgctcacgtcggccggcacaccgcttggcatctctgacgccgccgctgcggtaggcgaaagccaagacggctggggactcagactgctcgaaaagggctggatgacgctccgtggcggctgggatagctccggctcaaactcgagcgtcgacctgcacgcgctgattggctggatacccgaggtgctcaatctgcgggagtgcgtcgtctcatggcccaatgccgaccggtgctcgacggctgactcgactctgttactccagctctaactttaagcgcgagcaggtctggacgcgcctaaggacgtcgttcgagaagggtttgtcccacttgcttctagattctgcccttcaaccccgtggctgactcctgtgggtcggcctcaggctcggtccttatgacgcttggtactggccgactctcaaaagtccagatccgcgacacgggactcatcgcacggcatgactattcagtcctcggtgcgtctggcggtacgtctgtcatccaacgcaaacgcgtctgacagcgcatcttccctgcttgtatcagacctcgtcgagaaggatggcaagcggctcgtcagaatccttaacccctggaaacgcaaggcccgccttcgggcgaccggtacggcccgtgacgcgctcgcagccgtacgtgggccgcttgacagtattggcgaggaggacgagggctggtcggccgaattgcggtcggcgctcgaggtcgtcggagacgaacgtttgtctgacgctgactccctcccgcccattgaccgtgacctgacccttcttacctctcttcgtctaccgtaggcgtctttagcatgccgtgggaagttgtcatccaggtctttgacgccgcctacctcaactgggacccggacatgttcgggacgaccgttgctgttcactcgtgcgttatactagctgctgctcttccctgcggcccgtgacctcaaaaccacactttcccggcaggtcctggccgaagcaatcgtcgggtaatcacccgtcctcctttggtctcggtgcgtcctgctcaactctattcacgaggtacctccgctgactagacttgatctcaatctaacagctgctcagcctcagttcgagctgcgggtgcgcgaggcacgttcagtctggctcctgctccagcggcacctgactcggatccgcacgtccgacgacccgccatcacgcgacttcatcgggatccgcgtcttcgaatcggaaggagcgctcggtgcggatgggcatgagcacacggttagtccttcgcatggcgccaactgatgagtcgagactttgtgtgctgatgcagcctccacgcccataccctgctaggtcctcaccgacagcgctcttcatctggttagcgcttgatccagcgagggtgttagtcgcagtgaattgactggaccaccgtctgtgattcgcaggtcaagctcgctccaacacgcccgggctcggtctataccgtggtcctgcctcgcgagagcgatgcgcacgacgagggtcgcttcagcctgacggccttcgccgctggcccatcggcactggagctttctgactcgccgccagatctgccgtacgcaactcaggccaagggcgtcttcctcggccggacggcaggcggctcacctgcgtggccgtcctttattgacaatccaatgtacgagctgacaatccggtcaccagctggtggcacgactgcgtcgctcaaagtggtactgacggtcaagccatcgtctgatcgagcgaacgagcggccggccgtcggcgtcaacatcaaggccatctggcgcgcaggcggacgcatcgttgagttcgtgcatctctgtcgcccactgaaagcgagagtagtcattcctgactttgctcttccctggcagcctcgatgcggccgatatggcccttgactcgggcggctaccggcgcgagatggccatctgcagcaagtctaacctccagccagggacctacacgctcatcgcctcggccgcgaccccagccgacgaagccgactttgcgctcgacgtccagagcacggcgcccattctgctccggccgatcccgcaggaaggagccggcctcttttcacgaacggtcaacggctcgtggtgcgtcccgttgtcggctggcggttctcctgccgcccgcggctcaccaatgcgtaaaacttgagcaacaggacggagagcacctcgttcggcagcccgaccttcggaaactactggcgcaacccatcgagcacgctccgcatccacaaagacgccgacgttctgtgcatctcgtctccgcttgctctttacaaccactcgaagctgacgaccacatcttcattcttcgttcacctcgcacagtgtccgactctgcgcggcatccaggccaggctccagcgcgccgcctgcacgtctcccactcaacgtaacgatctttgcgagcccgactgccgcaaagccctcatcgtcgtcgtcttcgtccgttgcggctgggcccgagcgcgcgacctcaggcccttacacggacgccgtcagcggggcggcgatcggtcgcttccggctcgatcgaggtgaataccgcgtcgtctggtcgacatatgcgcccgggctcgagggcgactacacgctccgcgtctgggccgacagcgtctttgactgggagcggcggccggcgccttgacgtgcgtcggccgtcggccgtcgaagcccgcgcggcgacgagagtactcgacgctaggcgccacaggaatctagcccgtccgcctgccgaaagctgcgacgtcgcatcagaggtcgccatcaaacggcagaaagccgtcgcatgcagcagcagcacagcggcagaccgtccggccgtctgccctcatcgctgccgccgtcatcgccgctagcgacggccctccgcctccgccgtcaccatagtcccagcatagttcctcgccaggcgcaatgtcgcgtgcggcaaagaaggcgattcgggcggtcgtttggtgcgtcggcacgcggtgggtcgggagcgggacgagattgggcgcgtgcgagtggttgaggaagcgtctgtcggggcaaagggaagtggggatcaatcgcttgcacccgcttggtggcgcgaatgtaagcaaacggacccaatcccgccgattctggtcgggtcaatgtggacggtcggtcgaccgttctctctcaggctaaaaatgtagttgccctcttgtcggtcggcctgctgagcccatcgctcgcgcgcctcagatgtcgaaagaagctcgccggcgtaagtgcagatgaaggagccggcgcggatagccggcgtctgcgaggatgaggagcatgttggggcgaagaggccgagctggccgagcggtgagcgcccaaggacgaggttcctggcggggagcgcgggttcgcaggaggaagggcagcgtgttagatcaagggccgagttacgggagcgatgggccggggaaacgcacggatgaggcttgccctgggttggcctattggcgcacgtcgacgaagagggccgaggcaggagagcttttggacgacgccatccatcctggagcgtggatcctatgactgaagttaagctgacggctttgagtgctatggccgaaggacaggcgcagccgggaccgcactcgacgagcggcaagtgcggcgggtgcgggaggcgcagccgtggctgatgcggacgctcgcgtcggctggtgaggaaggtcggactgctgctagagagggatggcgacgttctcgggtggaggggcggcttcgagggcaccgccgtggatgagagggaagagggcgagtgcgaccgacgacgatgatgccggcgaggctcatgtcggtgaacgccaggtttgccctccttgagtaacggctgcttgtcttcctttggctcgtaaaaaaagccctgcggaacgaccttttgtctcagcgaacgctcgcacattggcagagtgaactgatgatcatatgagagggaaggaggacgcaccgacgcctcgatacactcgcaacccccaccgccgagcgaacaactcgtcctcgctccgccaccgctgccacccgcaacgccgacccgttcaacgagtgtggagcaatcgtctggctgagtcgaacatgagcaccctgcgctcggctcgggccctagagagtcaagcatcgcgtcttcggaggcgagggaagctgcggacaatgaggctggcctgccgttgctgctgctgctgttccgccgagggaggctgcggatatggtccgattcttcacttctgggagatgcgggtgatcggtgaagatgagggggagggaggacatcctcgtcgagcggtcggccgtcggattgacagaggtcgaagacaagctgtcgccggtgcgacgggttggcgagcgaacggatgaaggagcgagtcaacaagcctgccgctggcatcaggactccttggggcaccactccccctcctagtgaccctttctgcaggagaggggctgggacggacgacctgccacgtcttgaagagctcgacgaggtcggcctgctcgagcgcggccgagggccagagtgggattgcccgcggccaccagggagggacctcagcggcagcggcggcggcggtcgagctggtggctagtgctgaaggaggggcgctggacccgtcgtcggccgcagcggaaggcatgaaggagagattgccggtaagatggtccctgctccgtcgagcgagaggtgtctgcgtcgtcggctcttgaactggagcgagctcacgctcttgatgatcctccggccggcttgggcaggctagcgagctcgatatgccgtcgtcggcaagcgcttcttctgccgctctgcttgtgtccagagagcgagctggatggtcggcggtgaatgtcgatggtcgctcggccgtcgaactggagtttgttcagagggagcgtcggtcggatgcgcagcagcaaccgaagcagcagacagcccttcgcatgctaagtttctcaagagaagcagctgacactggagtaggggcagagctatgcggctgcttttgggaaagatgacagtcaactatgttaggaggtgagaactcgttgcttgggccgtcaggtggagcatcttgcctcggttgccgccgagctgatatcgtcgtcgggcgcgggctgacaggcaggaacgatccttgatgggcctggcgtcgagtctctcgataaggtgaagaacgttgtccgggtcgggtaagcagcgcctgtaccttgcctggtccgggtcgtgccttccttcttggacggaacgagccaggcgtgtgagtttgggccgagccttccggcggtgtctcgcctgcgggcgaagtgctcgcaagccgccatcgctcgcacccgaccatcttccctcgagccacgactcgataccgaaacgggaccagaccttacctaccttgctcggacgaccgacctcactctacgccatcgtcatcgcctcctgaagcggctcatccggctcgacctcctcgcgccgactactcgaggcgcgcctcctcttgcccgcgcgcgcgcgtccgtccatctcgccgccccttcgcctcgccggccgctccctccgaaccaccgtcgtcgcgcctcccttctccagccacctcgtccaacccgcccttcccacccgccagaaggctctcgacccaagcgaaggaatgggctgcggatcgtcgacgcccgacaagggcgaccgcgaccggtcgtacgcgatcgacaagcagatcgaggaggactcgaagaagtttcagaaggagtgcaagatcctcctgctcggtccgtccccttcttccgtcctcctttcttgaaatcccttttagcggcaactcgcaagggcttcgccggcgcagctggtcgacgacggggcgagcttgcgtggcgcaagaaggagggcaacgcgcctgaaggaagcagcttcctcggctgttgctgcatgtcagcctgcctccggaacccgggccgtaccctcctccccccctggacagagcgccgccgccgtcacgcccacgacgtctgcgccgacgacgagcgccccgatctcgtctgccgtcgtcgaagagtcttcagccgccgtcgtcccctcgtcgtctgccgtcgtcgtcccttcgtcctcggctgaacctgcgacgtcctcggccgccccatcgacctcctcggcagccccgacgacgtcctcggtcgtcacgtcagccgctccgacgacgtcctctgccgcgccgacgacctcctcaaccgccgccgccgccatctcgtctgccgtccggtcctcctcctcggcccgctctagcagcgcctctgagctccccaactcgaccgtcatcgtccccggcctcgtcacctcgcgccgctcgacccagtcctcgagcgctaccccgggcgtcagcagcggctcgtcctcgtcctccggcgggctcagcacaggcgcgacggccggaatcgccatcgcggccgtcgtcgtcggcctcgccgcggcggcgttcctcgtccgaaagttctacttccagcgcaagcgccgggcgaaccggcttcagccgctcgacttttcggccggcgggctcgggccggacgagcacgagttcaaggcgaccgagggcgcgttcgctgcggctggtgcgggagcgggaggcgcggccgcgtacgggatgaacgagaagcggctgtcgaccgggagcaacacgtgggagcggcgcgagcgcgagcggatggacctcgtcgaggggctcgacaacgactcgccctacgcccgtgccggtgccggcatcgtcggcgactacccggccggcgccgccgggcagggtgcatacggcggggggtacgacgggggctacgcggctgacccatacggcgcgggcgcggcggccgttggggccggagcgtacgagggctatgcgccgtcggctcactcgggcaacgtcgcgggctacggcgcgggaggatacgactatggcgcgcctggcggccagggccagggcgtcggcagccaggagggccacgtcgactacggccacccgcagcagggcggctaccaggacgtgagtggcgcgctcgagcactacattcctcctcgattgccgtcactgaccttacccttacttccccgcccgacagcaatacgactacggctacggccagcagcagcctcagcaccaggggtatccgccccagcagcccggccaacaccagcagtactgagcaaccgaatcactcgccgtctcccttttcttcctctcttttcgatccggaacactttgtctttctccgctaggtccgccttcttgaagggaggaccgcccttcgacctcttccagccgctcgttctctccagtcactcttttgccctccgtccctgcttgtccctccgtcctcctcctcctctgcgtctcttttgtaaacctccacttctcgcctggaaccctgaaccttcttgctcttttctcttcatgcgctttggcggaatcgcaaggcggcgatcgagggtcgggtcgagcgcgtgcgacgactgggcggctcgtcgagcggcgcagcaggccggctgaggagacgtgcacgcagctcgagctcttgcaccgctgaccgctaccttactccggtctcgtaactcagactctgccaaagcagccttgtaccgactggcttaacgttccagccgacttggcaggcatcagctagacgccggacgcccgtgcgcccgtgaggaggcggcgggaagccggcctttcgctcgctcgctcactcggttgttcgatgcgccgtctctgccggtcggcctccagttcttcaacagtgagaggccatctcaaggctgctgatctcaaagcgaccttcgctgacgctctcctaccgtttggcagactccaactcggccgcgattgctgagcccgctcctcggccggcacccgccggcgttgccttcgccgtccttgccgacccagctccacctgagtcggccgacagtccagccgccaacatctttgaggtcgagatggcgtcttctgacgaaagcgacgactcagacttcgaccccgaagcgccgatcgaggcagagccctcggccggcttctcgacacacccggaccccctgttcttcgcggcagagaacgacgtcgtcgtcctctcgtccgacggccagcgcttcggcttccggtccgtctttctcgtacgcctcaagatgtacgacgtagtcgtgaacgttctcgcgcgctggccagggcgggtcgtctatctcgggcttcgggatgagggagaggtgctcgcgcggctcctgctctacctccatccgggcgcaccggaccccaagatcgagaggtgcgttacgcaggacccactgcctatttcgctcccaatccgaagcatttcctgtatgttggcctctgccggtcggccagcagctgcgacgtcaacgagtttgattgctccgctctcgcgcaccacggtctgtacttcgcccactcggacagcccaaagctctttgccctcgcccttgactttcgcgtcccaaccttggctgcagctatcctgcacgacaacaagtctgcgcgagagcacgatatggactgcgtctttaacgacatgacgtgggagagcatacgccagcgtccccggctatctttcaccaactcttcctggagcccagcgaggatccagaggtctggcgagagacgtgtcgcgacctttgcacggtgcgtggcctatcgtgcgcgtgcgtgccaagttgcaggtgctgaccccagactggactttcacaggagcgcgactggttcgagccggcctcggcggagaaggccatggagcaggccgaggcaaggagggttttctgccggcagcgcgacaagtcagtcacgtcttcaagcctcttttccattgatcgcgctgacgtccgctgcgtctcgactaggtcgactgcgcagtcaggccaagccaacttggcccacgctcgctctgtcgcgacagtaagaggaacgtccccagcctcgaacgcggcccagcgccgcgctcgtcatctcgggcccttacctctgtccccacgaggtcctcggctgcgcgcttgcgttcaagctgatggctgttgcgtcggctgcgctccggctgcttgacgacgacgagccggacgaggcgacgcagaagagtctcttcgcgcaggtaccgtttaagatcctcgagcggatcccgcgttcgatcttcctccgcgtgctggggcactacgaggccgaaggctgctggttccccgtcatttacgggctcgagcgctgcccgcatttctggccggatagcgccgacgccgtccgccagctcgggcggctcgactagatcatgctcttctgccggaacgagcgactcgacttcagcctcgacgactaccttcgtccggccccgtgcgacccggccgcgagcgctgcggtccgggtcgatgccgagaaggacgtcgtcgtccggtcaaccgacgggcacgagtacggcttcctcaaggcgaccttggacgccgcctcgccgaagctcgcagacaaggtcaccggcgttgcgccgccaaagaagaagggcgagcgcatcacaatcaagctcaaggcgcccggtgcggtcgtcgagcgcttcctcgtcttcctccacccgacggttgccgaccccaagctaacgacttacgagcagctcgcgccgttagtccgggttgctgaaggagggttccctgtctgcggagacttgcctcttttttctcagtcctgatcgcccgagagggtgtccttcgcggcccctccacctttcgatcatgccccctcccttcctgacgaccggttcaaacgggaataaaactcaaggcagcatgcttcacgacactgggcgcaagccaaccccgatctcagggtgaggctccgtggaccggcgccgttggcgtaacaggcgtcgaaggcgtgccgagcgaggtcgtccgcaaaggtagcggaggcccggcgtctgggatcgagggcacgatgctaagcgacgagtcttgcgaaaagctccgctggaggtcgcgctgcgggcccatcgccgaacccggcacaggcttgcgcttgaccgaccgcggcgacatggcgctcgtcggcgagccgggcggcgagaggacggccgacgagatcgaccgggtcgaaaacgactgcgagatggagggcggcaggctcctgctcggcgggccggcggcgggctccaacgtcttgcgcggcgacagcggcaggcgaggcgacgtcggcaggtcggacgagtcggaccgctggcggtggtggaaggggacggtcgcaaagcgcggcgacgactgaagcacaggcccgccaatctcgggcggcgcaatctcgagctgcttcttgtttttcccgccaaagagcccaccgaggttgacctgcgagcggaagcgcttcttgccgcccgagaccgccttgcggtcgacgctgccggtcggcggcgacggaaagttcatctcctggaagccggtcgacgccatgtcaggcgtgagcctgccaaactggctgagggcctcgagcgccgacgtgtcggagaccgagcgaccagcagagctgaccgccgctcggggaggtggcatgccgcgcgagtccgggatcgactgatggcgaggcacgacaacggcagacggtccgccgttcgtctcacggtcgcttgctggaggcgtcgatgacgacgcgccgtcctccatggagccagacgaaacggttcgaccccagccaaagctacggaagcgcgagccgctggcctttgagttggttgtcgacgcactctccggccattcggcacgctgccgtccatcgtcgacgcgatcgtcgtcatccgtaaggaaagccgactgaagcggcgaagctgcaggcggttgctggaacgggaacgtcgagctctgcccgtcgccgccgccgagcggtgacagaggactgccgacagcgtagccggacgtgatcgagctccccgagctgagtcgccggcgaggatcgaaacgcgatggatcgggcgacggcacgcgtggagacaggggcgagggcttgcgcagcggcagagcgacgtccgagaggagtggcgagccgggagagacgggtaccgcaggccaggttggcggcacaaagccggaagtcgcaatgctgagcggctcgcgggcggcactggagggcgaatcggacaggcaaggtcaatcattcgcactcaaagaagagagacgctgaagcaagacacactgttgttgctccttgaatgaggtggcggtgctctgcgcctccgtgctgccaccggtcgcaccgaacgtctgcggctgcagacgggatgggccgtccgccatagctgcgcccatggatggcaagactcgaggggatgagcccttggcgacgatcgagggagagcccgctggcgagacgtaggccgacggaggaaacgccggcgagggaaacatagcgaaagaggagccggacggcgccggcgaaagggatgacgcgccaggcgagtacgcgaccgagcgttcgcgattgggaatcttgagctcccgaggcgagagcgagcggacgactggagagcgcaaggggatcatcgtcagcggtaagaccgacaatgcgcagtggacggcgacgtacccttctcgagatccgcgagcgtgtcctgcatcatgagagcactgccgcgcttgcccggcccgtgcgtaccaaaggcgccctcgagcgccgcgctaagcatgccgtcgcttggtccgctagaggcgtagctgtcgacgctgccgccgctgcggaggtaggcaagcccgcccgttgcgtctgatccagtcggcgaaaaggcagaagtcgggctggtgacgagcgttgggaactgggccgacggcgccggcgaggtgatggcaagtgtgaggttgagcgggttgccgttgctcgccgtcatggtgccatccgtggcgtctctcgcggacgacttgcgacgctgcttgagcggcgtcggagggaggtcggtctggccttgaggctggtcgggagtctctcggtcgagaggaggtgtctcgatcacgggtagctgccccgacgtcaaggtgtgctgggcaaggagtttttcgatctcctgaacgccttgctcgggctcagcttggtccgactcctcgccaccgagtttcgcgccagtcaggttgagcccctcgagatccttctgccgccgctgctcgacgctctcgaggccgagaccaagcccgatgccaaggccgagaccgacgctgccttcgcgcggcctgctctgtgccggaggagtcgccggccgctcgtaggcaaattggtccgcggcggacaggtcgtctcgcgcagaacgaagggcaaagaagtcggcctcatcggaagggaacaggtcgccgagagggtcgccggttctgggctggtggtcgtccgagggcgcgctgtcgtcctcctcgtcaccgtcgtcggccgagttgccgttctccgcgtctacggcctgctcttggtgcggcgacgacgatagagggaggtcctcgccttcggagagcggagcgtagccttcgtccgcggcgaacgaagtctcgtcttcgctctcggtttcgacgtcgcgagccgtcggcagcagggcaatggatgacgcgatggcttgtgcagtcgaagcagcggcgggccgcgccgccgcatgccagccaccagtcggccgaggcaagcgcacgacgtccttgcgagccagccatcggtcgtaccactggctcgagccgcgctcatcaaagtcccactccaaggtgccgacgatgctgatcgcgccgcctttggatggtccctgagggccggacggccgacgatggaaggcagcagctgaagcggcggccagggaagacgaggggcctggaaagggagacgaaggagttcgccggccgacaatccgggtctgcgggcgcgaaggagacctttcggcgagactcagaggtggggcgacgtcagcgttcggcttgacctcgatcgccgaagaaggtccggacggttccaattcgagcgctgcgctcgttcgcgataaccgtctggcggagagttttgacccgttcagccttgccgggacgcccttggctgacagacgggccagcttctttcgcgctcgaagcgatgccggggtcagagttgacggcgtgcgcgagaggagcgactcggagggcttgatttgcctcggctgcgaggtagggtagcgagtaaccgaaggaccggcagtcggctgcgagggtgacgcgagcggttcggttccgtagcgcggccgctgtagcgaagcatgagaggtcgctggcgacggcgaaggtgacgaagacgggtcgagaggtcggccgtcgtcgctcatcgcgctcgccatctcgatagctcccccggagtgagggcctctgtggagaaagtcgcgccaaaggatctcccagacgccttcgccgagccgtccctcgcccgcgccgttctcgtagacgagaaagagcacaaggccgaccgtcgaaggaaggccgaactcgcgggcaatcgctgcgagttgagccttgagcgatggcaaaagcggcagaaggacgggcgacgatgcgaggtacggcggcgcttggaccgaaagaaggtgaccgcttccggtcgtacgcgtcgggcccgggcctgtcgtcggcgcgcccgacgagctcgcgcccgcgaatggcgaaaccggtagcggagacggcggagggaacgacgagactgaggacgaggccgagctcgtcattgaggagccgccgcgcgagtgcgtgctggccgaggtcggagggatgagcgacgagctggatgcgggatgtgagaccgacgacggcgacgaggctgccggcggctttgccggcatggccatgccgaacgccgaggcgatacccctgagcttgccagggtcgagccgcgtgccctcatgccgatacctcacctctttgcgctcctcgtctggcttggcaggtcggctggatgagggctctgggaggtcgagccgaggtccgaacgcaccgcccgcagcaagggccggtgagctcgctgagctgagcgcagggctcgggaacggactctcgccgcctgccgaagacgagtcgccgccgttcagagtaggtgaacggtcgggtcgcgtcctcgtccctggcggccgacgcggccaggcctcagcggccgacatgatgatgggagctggtgcagccgacgaggggttttagccggagagaccaggtgaagggagcgacgcgacgcgcgggcggtctgtcagccgcgtcctcccaacgaaaggtacgagaaataagagcgcaccttgcgagttcatggccgaccgctggcagtcggatccgtatcgactctgggtcgttgagaaggggggttgaggcctgggagggatctctagcgtctctgggcacgagccatggtcgaagtcggcagctcgcggccgcgcgaagcgaaagcgcgtccttctgtcggccagccgggctgcttcctcctgccgtctgaccatcatcttcatcccctcccttgcaagccagttcgccccatctaccttgctcgctccgatggcaaccagctctgggtcgacgcccggtccgatgacggtcgaggagacgtttgcgaccggcccgcccgcgaccggcggggcgccggccgtcgcgtctgccattaagctcgtgccgacgcccgaaacggctcaggatggcctcttcgttatccaggacgtgccggtcaactccaagggtgagtaggcggagctggtaaggctacgcgctcggatgctgagctgaattgctttgcccgctcccccgtggctcgtcaggcttcagctacctgccctgcgcgccgtcgcccgtcgcctcgccggacctggtctatcctttccttcgacctgtgccttatccgccgccgatgccccaaaaccagccacatctgtcaacaacggatcgcaacgcgcttattcgcgtctcgcccgacctcttgacgtgctcggcgccggatggctggcggagcatcagatgcagtacgcccgttcgtgaaggctcggtctactttgagttcgaggtcgaggtagcgggttcgtctgcgtcggtagaggatcctgcagcgctggcgtcgagctcgcatgccgctggcgtggcaggaatcggaggtggcggtgtcgccccggcggtgcggctcggcatcggtcggagggaggcgacgctcggctggccggtcggcggcgacggttactcgtacggcttccgcgaccgaggcggcgagaagatctggctcggcaaggtcaaagagtacgactctcggaccgatgctccgcgcggcttccgctcgggcgacgtcgttggctgctggatcaatattccgccagtcgaggcatcgcgagggccggtgcccacagcagcggacgtcgacatggaagcgacggccgctattgcgccttcgtcgtcgtcgatcggcgacgcgtcttcctcgttcggcaagcggtgggagtttgatgcccgcggtcagccctacctcgccgacgttcctcctcctcctcgaccgccgacaccaccaccagctctagcagctccggccccgtcagccgataactctatgtcggctccggcacctccgcctcctgccgcgcccgctccgtctcctcccggactgacaccagctttcgacccggctgccctccatcccgaccgccgcggccggataccgatccgttacaagaaccagctctactttgagtcacgcgcgccgcagatctcaaaggagatggaggtgctcatggaccctccggtcgtacccgcctcggccgctgcgccctccgctgcagacggtgacggcgagccgatcatcctccgaaagaagggcaagaaccgcatcaccaacaagacgctgccgtcctcggacgagatgctgcgcgcgtcgctgacgaccccgctccggtcgctgccgacgctgcgcggctcttccctgacattcttcgtcaatggagtgccgctcgggccggcgtttgaggacctcctcgactggcggcctctcgccgtcgttgaggaagaggtcaagaagggacgcaaaaagaaagcgtcggcgcagacggccgacgtcgacgacggcacattcggctactacccaatggtctcctgcttcggcggcgggcgcgtcaagttcaacccaggaccgcacttccgatttcctccctccttcctcgcttcggagagcgacggctcaacaagctcgtccaatccgagctcatcaccgctcggaaccctctcgacctgcgcatctctcacagccactcatgcgctgcagacggcgttccaacgatccatggacgagctcgccgaggagcttcttgccgtccgatgggtccgtgacgctgcagaggaggccgagcgtgtgcggctcaaggcggcggccgacgagcagcgccgggtgcgaaggcttgaagccgagcgggcaagaacggcggccaagcggacggccaaggaggaggcggacgccaggagagaagcgggcctcagcctcaagatcgagtccccgccttcaggctcggctgtcgcttctgccgaggcatcaccgtcgccgatttcagccttgctaccttccgatccggctgtccctcatccgtcgccgtcgccttccgaagacgctgcgccgctgcccaacggcaagaagcgctcgcgctctgcctcgaccggtcctgtcaagcccaaaggtgcggccgcggcaaagaagacgttgtccaagtcgaagctcggcggcgtctcgatcaagcccgatccggacgtgcaagtggccaacggcgctgagcgggtcgcaactgtttctggccagtccaccttttctttagcgcacccgcatccgccgcacgtcatgcaggaggcatccgcatcgtcatctgcctcggcctcgccgcagcccttcccgatgcaccactttgcctacccgccgccggccgcgacgccctttatcccgccgccgacgccgataggcgcccgggacgatggtcagtcgtccttttcggcctttccagctccctcgtacgcggccgcgccagtccatcagcacttttaccagccacagtttgacggcaggcttccgcccgtcccgcgccaatatcagcagtacgcgccgcactatgcgcagtaccctccgccgccaccgcaacactcattcgaccagccgcccgatcagcacaggacccagcggcagtcggcctcgcagcccgagatcgacccctcgttgatggacggggacggagctgcgcccgttgcgggcgtgccggacggcgtcgagctcggggaagatgacgcagagggcgagctggaggacgatgtcgacatgcaatgaggctgcccattcgcgactcgtgcggaggataaggtcgcatgagatcgcgccagagccgctcagttgagcagggccgaaagcgaggcctttttgccgccgccaaaggtcagcttgagtttggggatggtgccgctcggcagggcaccgtccgtgacgggctcgaacgacggcggcgcgtcgacgacgacggatggctcggcgatggcctgcgcaggcgttggtcgtgagaggtggccattgatgcgctggctgtcgcgcaggacggcaacctcgatgcctgtcaggtgactcggaggtcagcgtgatggacgggtcgggaggagaggtcgctgcggacgaacgaagatcgtgcaccgcctgatcgtcgggctcctgctcggtgtccgagttgtagcacggattgcccatcgtctgctgagccttgctgtacgcgactgcgagggtggagcaggaaaaggtcaggctgtcagcgtcgtgcgagctgaacaacctcagcggcaaagactgacgatggaggagcctcttttcgcgaggcggaccgaccgccggctgatccatgtagtacgagatgtcgagcgtcggaatgaagactacggtgcgagcgtgaggcgggtcagagtgagcacccgatgaagtggaagcgagtcaagacgtacgtggcggcttgaccggactcggcggctcctcgagcagctcatcgacctcatcctcgagctcgtcgtcctcgtcgtcgtcaaagtcaaacgtcttgtcgccctgcatcgacgagtcgtcgggtccgccgccgccgccgtcagtcgccgacatggcgtccagctcggcctcgatgtcgtccatggcgttgacccgcggcttcttgcccgtcttgggtgcaccccagaaggccgaccgcttctcgcccttcttgccccggccgacgccgcccgtctccttgaggacgaccatatcggcccggcgcttatcctccatctcgtagccccaccggagctcctcgtcgaggtcaaagttctcgtgccgggcccgaagctcgtcgacgccgatgtcgggcagacttggcgcctggccggggtgggtggccgaaaagtggtcctcaaagaggttgatctggtggtgggcgccctcgtggtagcgccagagcagccagaggatggcccgcgcgcgtaggctggatggaatcgtgtgcttctcctcgttggcgcagagcaggtcaaaaaagtcgaggccgcgaggaaggtgtcgctcgccgagctcggtcgacgcgccggtaaaggcgaagagcaggttgcagatgctagtcgacggccggcagccctgagcctagagacagaaatggatgtcgcagtcagaactccgccttcccaatcaccagcatagcggcacaagaaacgcaccgtcttggcctcgacctcggcaagcgtgtatggcggcgtgccgtcgtccgacgacacctcgacgccgcgcaggcaggccttgagccggggcgagtcctgcagcagcgcctttgacgtctcagtcttttggatcgaggggatcgaatgatagtgccggatgagcgtcttcatctctgggtagaatgctgccgttgtgttgatcttgccaacgttgacgagaaaggcgacctgcagaagggagtacagcggtcaggaacgcgcgccggatgaaggccaggcccgcacgaggagctcaaacgcaccatcagatggtccttggcgaagcctgcgtcataacgcatgctatcacggacgcgcttcgtgatcttggagctgttgaggtagctctcctcgtaaagctcacggaacgtaagcagctggcgctgctggagtcgcggcgcgatcgcggcgccgggcggcggcgtaaaggcctgagtctcgtcgctgaaaagcgcctgaagcaggtcgtgctggatcatggagcgggtgaagggcgacccatcgggagactggatgacatagcccggctttggcgtcttgaagacgatgggactggagaagggatcggccgcagttgggaggatcagctcggcttcggccaccaggctaccccgggtcgcgcctctcgccactcactctcgcaggccgcgactccgataccgcttgcccgaggctgaccgctcgccgccagccgtctcggagaggacgctgccggctgagggcgacggcggggcctgcgactgctcggcgtacgacccgggtgaggtcggcccctcggagggaggtatcgcgtcgacggggaccggcagccgcgacgttgacgccagaggcgaggcggccgcgggtcgcgagtaggacggccaggcgaacatcagggcggcgcagtgacgagggcggcgtgcgaaagggccgagggatgcgaggcgaggtgatggctgttgacgcgtgctggacgggcacggcgcgagtcgacctgctggcggacgtcgacgagccacctgctgctcagcatctcccactcctcgaagtcgcgctgacgagcatagcatcgacggatcgccttgatctctctctcggcatgctcactgctgaccgactggcagccgggaggcaggggcggcctacctgctgctgacgactgcctggtccaaggtactgcgcgcgaccgatccagctcaggagcgacgggctgcgtccttttgtcctgacgtcgactccataagcgacgacctgctgaacgagggtgcgtctgtcgcatcttgcttaacgtgctcccctgcaaagctgactgccagcgcgcttcccagcatcagctctcaccagacgctatactcgcacgccgcgccgacaacctcaacgcccgccgggctcgaccctttgttctgactcctctccgacccttgtgcgtacaaccggccgcttggctgcagaagagcgctcactcacattgaacggcgctcgaattacagatacgctgatggccaacgccatgacgcccgccaagcaggacgacaagccgacgtctgccataggcctcaagcctcccgcaggcgaggaggcgtcaaatgacgtcgagcacgtgtcggccgacggtcagacctttcccttccggcaacgctgcctcgaggcctgctccgaggtgttcgaaaacaagtctgccaccggaaactcgcacgagaagacgaacaacgggctcgaccttgtccggcggcccgacgacggcgcgctcctctcgaccttcctcctgttcgccaatccgagggttgccgacccggagatctccaacgcatcgcagctcgaaggatgtgttgacgtgctcccatcaactcgcgcctgaccttgcagctgactctgcgatctctctgcggccaggctctgcgacctctgcgacaagtacgccgcgaggggcgtcatgcttgccatcatggtccaaagccggcgattcgttcactctcacgccccgctcctgctcgttctcagcatgcttttcaagatcgccttctgaccagcgccgcccttcagccttttagcaaggatgcattcatgctgagcgatgtcgactttcggctgtccaaccctctgtcgcgcgacgcactttacctgctgcagaaaactcaggtcaccgcgctcaagggcggcctgagctggacctctctggcttctctttttggaccgggcgcgtgccagccacttgccaagcgtcgggtcgtgcgtactgactacgtctcctcgccggtgcaggatcccggcctcctggaagaggctcttgagaacaagaagatggctgccgccgggactctcaacactgttccggctttcgatatgtactcggaccttgcgagagacgtcgagaatgacctggccatcatctcgtctgacggcggcgagctgcctttccggcgatcgtatctcgcctcggcctcgccagccttcgagcggctgctccaggcagagctctcaaccaaatcgatcgagctgtctgccacaactgtcgacgtcgaggtcttcttgcagttactctcgccgcgccacatcgacccagagatcgacagtttcactcggctcgaagggtacgtacgccgactctctccctcgccaccttagctgactcagttgcgacacctgactggccacgggctctacgacctagcaaccgactaccgaaagaaacagatccttgacttcgcgctggagcaggcttccatgttccttgacgagagacgcgcccggtctctcggctttggctttgcttcatcagccacccgccctggcgagcgcgcgcatctttgaaacgcttcgacggcaacttcagcttctggaccgaggacttcagttatacgacagctgaagaggtccgagcttcatacggtgaagttgttccctatacgcttcggtcgtgcgtcgaaggcgtgcatcgcttctgctccgcgacacaccctggcagacattcatcgacgactgttgccgcaagcggtataggacttgaatcaataccggctcctccttctggatcctgccaaagtcaccaagtcgtggtcggccccgggcctcaagctgaagaaggtgcattcaagacccggcctcctttgtgcgacaaggggccgacgctgaccacgaggccttttcgcgacgctgggagcccggcctcctggcgactgacgagaagacgctgctgccgtggctggaagctctgccttgcagccgtctcacatgaccttgtcgcacttggccctttggggcttcccgccagacgctgacaagcggtttccaggaggcgctcacaaaggaggagcacatgagtacagctagagtggtcggagagtagccaatatggagcgagaggaaggggaagggcgattcagagcgttcgttactgtactgtacatcttggcgagtggtggagaagcgagcagcagattctgcgcaggcgagttcggcgaggcaccacgaagagactggcccggaccatcggaaggtaagaagcggtcgacgaatctagttcttgaccgcgtactcgtcgcgacgctcgtcgccgtggaggtcgtacttctcgttgatcggctgaccgccgtccgcgccttcgacaatgaggtcgcgctcggtcaaccagatcgaccaggggcgaccgtgcttggtcgagcgagagcgccacatgacaagagcatctaagggtagaggacagcaaagtcagcagctgccagtaatgttgcggtcaaaaaaaggcgaagtattcacaggcagtcatgatgacgaaacctgtgggggaggcacatcgaccgataagcatggtgcgcgacctcaggaccaatgtaggaagagaggatacttatgacatggggatgacataactgagatgtgatccgtaccgatcggcgaaggcggcctgcattgaggggtctggggtcgggcggaggaagctcggtcagtcacttggcagaattttgttgattaaaagtgagatttctacggacaggcagcgccacccgagacgccactgtttcgggttgctccgaggcagggtcagcataagaaggtagtcaagaggaaaggtcgctgtggacgcacacggtgaggatacctgctcccagtttgtagtatcgtccgagatccgctgtggcaatagcgaagatgatcggatacgaacacgcttcaaagaagaagacgaagaacaggcagacgatgccgccgatgccggtcactgtcgaggcgaggatcgagaacaggatcatgccgacaccgttgacgaagagggcaaaggccgggtcgatgtactgaggagatggatgggagatgaatgtcaggcaagatcacgaagagtcggaatctagcccgggaggtgcgacggtatgagattgagaggaggagaaggaggaggtcggaggagctgcgcgcgtgcgccccttgccccttctccctccgcgctgccggactcacacgcaggtaccagacgccaacaaagcggccgatagtgaagacggcctggcatccagaaaagaggtcggagccggtcttggccgagaggatcgggaagcgaaccttggggtcggtgaagtagaaaatggcgttggaggcgaccgcgacctgggcgccgacatagaaccactgggcgacgaatccaccgaacaatctgtactggtgcaggaattttcccacaggccggacgtcgatggcctgcttgacctcgggaagcttgacgaaaaagaagaagaggttgaggaggacgccaaagaccgacagcgccaggtagacatactggtcgcgggcagaagcgagtcagcgcgcccctcaatttttggtcgcgcgccataagggtcgctccttggttactgacctggaccgtgcccagctcgcccttgacggcgttcttgcccgagaagaaggtgttggaggcgatctgcggaccgacaactggttgatgatgaccgcaggcagattgtcagcgccagtgaagagagagacgccaatttctgttcaggacgcacctgtagcgataccattgaagccctgagcaaggacgagacggagcgcggcgtgcttgggcggaccaaggacgaggatgtaggcgttggcggcgacctcgagcgtcgcgagaccagaggcgatgatgaaagtgaaggcgatgaacatggggtactgcctggggtgcagggtagggtagggtcagtgtaaaggcccgaaggaagggagcttcaggaatgggaagacggtgataaaggaaagcgagaggaggcgcgagaggctcaggccgagtgctgcgcctccagcgccgtcacgcgaccgcaccatggcaaccgggctgaaggcccggttgctgagcggcagcgccgtctggtcgcaacagttaggttaggttaggatagggcagggttagggttagattacctgtagactgccgcaggccagaagaggatggcgccgatgctgaagagaaggaggggttagacaatcagtcggcgaggacgaggcagccggatgcaagcgacctacgagaagagcgcgagcccgacgtggatgcccgccttgtagccgaacttccgcataaagactgttgaatgcggctgtcagctccggttgcggctgattgaagaccagcgctgcctactcacacgacatgggcggagcggcgatgagataggagacctgcgaaggaaaaggaagagggagagtcagcgcgcgtgcgcagctcgtccttggcgccgctggccagcaggcttcgacgctgcctctggcacatccgttcctagagactttgtaaattgttgtactgacaaagtagctgagggcgtgatgaggcaagcagcaagcagatcagcgaggaacaagggcgcgcatgtgccttccgacgaggcggggcgatggacgacgcacgcgaattggagcagagtactctggaccttggtgaggttgactgcgtgaacgaggccaaggtcagcggcagtgcagacgggtcccgatcgacaaagacaacactcacagacgtcgaggaaatgcttgtttaaaacgtcgacgaggccgtaagaaagaccccagaggaagaacagcctgaacaaacagtcgcgagcgggcggatcagcgccgcgagcagcaggaggctcagtttccgagcgcgcaagacgtacgacgagacgagcgcgaagctgaagtagagctgaaacttggtgagctgtcaacgtcgaccgggggaaataggtccaggtgattagcgaccgatctggcttggccatgcacatcatcaggtccaacgcgacgcacctgcgagtagtctcgagcgttcagccgagcgtcgttagtggcatcttgcgtctcggtagccggagggggcgacatgctgcgatctcgtcgggcgggcaggtgcgatggtcgatcggacagcggtgtgcgaggtgggggatggggaggaaagagaggccaagagccgaccgaagagacgaggctcttgagcgagcaagcagcgagcgctcggccctcgccccgagagccgcctgctcagtgctggctcagaggcgaccgacagcctcgggcagggcgatcgacacgctcgaaacggccgcatcgtcaggggaccagagtcaggggggcgcggaggcctcgtggccggaagcctgggcgatctttagaccgacctccgagccccctttgttaacggacgacgcccggcggcagcggtggctgggagcgacagggtgaaggcctgcttctgcagcaagtgtgcggcagttgctgtgggtcacccagagcagcgcacgaacgaggtaagccccgtccaaaggtggtcgagtgggtcgacatcgagactaaggaggaaaagaaggagaggcggcggagatgctcaagctgggccgaccgccgacgttttcgccacccatctcgccctgctagcaagcaggcaatcaacacagccagcgccgcggcaaagagcggctcgaggcagcagccctcgacgcgatctctgactgacccaggtctcagagtacgcaacagttctgaccaccgcctcggccatctcatcgccgggcgtgttaaccatctcctcccgtcgcgtcgtcgtcggcggcctccgccgtcgccggcgcaaccatcctgccgtcgaaagcggaaccatcctccttcagcgcaagacgaccacgccctcagctcatcagccacgacgggcttgctgctgctgctgataggcctctagcgtctaaacccgtcgtcggctcgactcgcgaccgatgcaccgaccttgagcgcctctcagctcctgaaccctcggtcgacctcgtcagcccccgcctgccttctttttctccgagttcctcgcatggccagaccaagcaagctcaaccgaacagtcccgcccccccgaagcctgatgaacttaccaccgcaggatggcagacgcggcatcacatcctcgctcatgcccagcgtgcagaggggccgaccggcttcgattcgagcaggtcggcgcccttggtcgtgctctcgagcacctcggcaggcccagagaagatggcgtcccgaatctcgcgcgagtgttcgctctaaaggcacgaggagaaatgtcgggcaggcaaaatcagagtcagcgggcggagtgaataagctcaggctagcagaagggacccacgccaatctcgtgccaggccatcttgacccactgctcttcagactctgtccgtaggatctggatgttggtgttgctgacccgagcgggtccgtcgcccggcggacgcttgaccgaaacctgcagcgtcgtcgaggcaagagcggagacaaagacggaattcagaccgagggaccgggtcagcaaagcattctcgagcaacagggttcggaagggcaaaaacccgtcaaccgacgagggaggacgcaccgcgaccgccttgccagcgtcttctttcttctcgtcatccgagtcctcgtcgccctcgcccgctcgttcgcgcctgcgctcctccttcgaccgttcgtctagcgccgtcaagtagtcgagtgatggtcggagctgcatttgaagcgcgagcggatgcaggtagagcgcgtcttgcgaaggaggcaggtcagccagggcttcacgtacctgcggccagcataggcgcgactcacctgaccggacggagcccgccatgtagaccgtctggccagggacgacctcgctcctcagcttgaggttcttgagcatcgccatctgctggccgagcgagtcggctgcggtccgctctttcttggccttcttattggccccgccggcagcagctgcctgcgcagccgcgagcagcgccgcctctttctcggactgcagcttagctccctcgccaaactcggcaccacgctcgcggtcgtagatctctggccgggtgtcaagcgggatctgtcgcgcgtaggccggtagacgggggggtgggggtcagtcgccactagcgacacagtgcgctgcccatcctcgcacgcacctcgagctcgaagcgtcggacgccagccttccatctggcgttgatcttgccgccgagctcggccgcagcatccggaacctcgattcgctccgtcaccgggtactggaagagatggaggttggcgccgtgcgtctgcgagaggtagacgggcaggaccgactcgacttcgtcgtccgacgacagcccgagatcgtcgtacgcgccgccaaagccggccgttgctcctgtctcgtcgccgtcgtccgcgtcgatcagcgagtctgataagagggtcgatgtcgagcgccgcggggagcggcctgtgcgacgggatgaggacgtcaggccagacgaggtcgctgtgccggcagggacagcggaggttgaggcttcgggctgcggtgagcctgcagggaggaggaagggcaggtcagtctctcgagctcacattcgagggagagactggacgcacctcggccgtcaatgtgcttggcagcagtagcagctctgctaaacgactggtcgtagggcgaggctcgcgagcgcaggtcagtgcgggtcgacagaggcagacggccggcgaggcgcacagagctgcatcgaacggaccatggcagcgagggagtcgagagtctcgcaggaatttggagtacggtctagtaggctttgctttcgagcaagcgggatcgagaacggggcgagatggagagggcgacgaggagcaagggggagggcaggacgaagggagctcgagtccagggggcagcgccggcgcgtccagattcggcgtgcaatttacgcggcgttacgccagcctgtgtaacacgcccgcgcgcagagaggctctcggcagctcgcaggacgaccttcaacgacatctgcctctctcctttccccctcgtccgcctctcctcctactctagctcgcccatgtcggacgccgagcccaaaccgatggatatcacgccagcaccgccagcggctgaggaggcaccggcccctgcggccgacgccccagtctccgaggccgctccgctaaccgacgagccgacgccagcagccgcagccggcgacgagacgacgacgacgacgacggccgacgagccgatggcctcggcagaggaagacgccgacgcggctgctcagcgggcagacgacgagcggatggacgccgagatccgggagcgcgaggcgcaggaggagcgtgatgccgaggctcgcaaggaggccgagagggtcgctgaggaggctcggatcgagcgcgagaagaaggaggctgccgagcgggcgacgtggacagagacgctgtacatcaacgtcagtcacgtcaggttggtgtcgtcaagcagtgctctgagctgacagatggctggcaccccttcctcagaacctgcacgagaaggtcaagatcccaggtcggttctctcgccttgtgccctgattttgacagctcgactgacctttgccgcccttgcctcactccagtgatgaagaagtgcctgcaggtcatctttggctcgtacggcaaggtcctgtcgataacggcgcacgagaacgtccgcatgcgcggccaggcgttcgtcgcgtttgagagcaaggacattgcggccaaggcgctcaaggaggtcaacaagtttccgctgtatggcaagccgatggtgcgctccccctgctcttactctttagggcttgtcgtgcgcaagcgctgactcgcgtatcgttgtgctggccccttgcagcaaatctcgttcgccaagacggcttcggatgcggccgtgcgcaagctgaatgaggccggctttgattcgcatctggagagccgcaaggagcacaaacgtcattcccgtcccagccgtcgagacttccgtcgcagatctgtgctgaccctcggtcgctcctgcttgggctccaggcaagacgcggctcgacaacccgctcaagcagaaggagaagctcaaacggaagctcgcgtctggcgacgtcgacggcgcggccgaggcggcagccgcggtcggcgtcaagcgggcgccggtgatgatgcccgaggaatatttgccgccaaacgcgacgctctttgtccagaatctcatggacggcatcggcaaggaggagctcgaggatctctttggaaagtacgtctggccgcggctcgtgcttcggcattgacattggcacgtggctgactcctcccctgctgctcgccctgcaggtatgccggcctcgtcaccgtccggacgatcgctgcacgcaaggacattgcctttgtcgactatgccgacgagaatgcctcaacggccgcaaaggagggcctcaacaaccacaagctcggcccgggcgagggcgagccaatgcgcgtcacctttgcgcgcaagtaaaaagggtggggctcttcgaggggcaggcaggtcgtgtgcgaccgggcgtcctttaccgctggctcatggtgagagcgggcaggcgtggcttattgccgatgttgtacgattttggcagcgctgagccgcttggctaacagcgaccgacgaccccagggcgggcggttgaaacgctcagaacggccgctcttggtcggtcagcagtctcggcagctcagcccctttgtcgacgcccgacgccgggaaaggctgacagcaacggggggagcctgttgtgcaacacagcgcggcagtgtcggaaaggtggcctacgagaggcagccaatggctcgattgctgcggcaggtggtcgagagtagggaaaacgtgccatctcgatcactgaggacgatcacggctgggaggcaggcaaaagcttctcggcctcctctgcggtgcacagcatgtccctcatgagcactttcttgagcgtgttaatgctgacctcaggattcttgaaattcttgcgtctctattggtcattagaagatcagattcagcttggggggggaaaagggggggagggaagaggcaattctaaaggaagcaatggtgatgacgcacctgaagagccacaatgatcggcctccagtccttgacatccatcttcctttcgagtatggctgcctgaaggcgctggcaatagtagaggaagttggtctgtggcatccgccggtagagaatcagagaaatgtcgtgcagcgtctgccgggtgacaaagaagcggtcgagcgcccgggcgatcgctctggaggcgccgtgaaggaagacgagggcgagcatcttgggagcatccgcgaacaggaactggtcggactaatcgagcgcggaaaggaggagcgagggcgcgtcgtacttgtcgcacatgtcgcacatgtcgcagagcctaggcagcccgggcgcgcagcagacaggagcagtcgtcgtcagatcgtgcctcgggcgagcagggaatagtggagaagagcactcaattctttagcgtctgaagatcggtgatcttggcgctcatccgggaatgagggagccagaggaggttctggacgagcactccctcttcagtaagccggaggatgtcgaacccgtcagagctcttctctcgcgaatcgttgccctctccgattagaaaggcgtcatcgagtgtggcagaagcggcccgcaagtaaagtttgcggaacttgaaagccttcttgtcggaagagataatgaggatggcgttccagtcgtcttcgtcttcgtagaggaaggtctcctcgtcaaagaacggctcggttgcgagcatcgaagcggccatgtcggtgggctggctgttgggcgggggtctgtcggaagataggagagcagaatgagcgaccgagagcggacaagtctccctcgagccacgcacagacgaggcagaggtggtttgggatgagtagagtcttcgcgagcgggttgacgtcaagggcgagccgagggttgagctcaaagggaagcagcgcccgcccgatgaatctgccatcagctcccatcgtcccgaccaccactcgcgcctgtcccaaggccggcttcagctctacttgtttcccgggacattatcaggccttgcgtcctcgccgcggtcaaggtccgtttagcagtcgctcgacggttctcgcgaccagacaggagagccgacgctcctgtcgacgcgttgaaggctgacccgcctccttggtcgcctgtcagctgccgacctaacagtcgacgggcgttgacagtcatgcgcacgttcacatcatacgcctcgcagcaagacctcaaggatgacgacgacttcttgtcggacctgctgctggtacgtcccttcgtgtcaaggatggagctcgcaggcgcgtcgtcgcggaggcgagctctcgcttgacatggccagaggttgaccttgcgccgactcctgatctcgcaggacacgctcggcttacctgcagacagcagacgtgagtctcaatttgtcagccgtggttgcaagtctcttggctccagggttatccagctttgggcccagcgagctgaccgaggcgaccctcaccctgtcggcgcgcagtcggcgtgcacaagtgtcgagaccagcaccggtcgccgccttacgaccgatcagccgtgcaggtcatcgtcaaggaggtcagtcttagactttgatggtccaagtcgcctttgaggaagagcagaagactgactggcacgtgctgcttgcagtcggtctgcagcgccctcaaagctgacgaagggctaaagcggctgctcttgtgaggaagagtctcttgcagcgtcatcgctgctgccaggctgctgatcaattctcgctcctttcaggctgcctgttgtagcagactatttgtcggccagggacgagtcgcaggtcgctcggttcaggtcgtgagtgatgtctggggcctgtgaagcaggccgagtctctgatcgtcgacttcacgcccctgcagacaagcgacgctctaccttcaaatgtacctccagcgaaggtgcgtgtctgatgcagtcgtcaagcagtcgatggtggccgacactgacccgactcgtttgtgcccaccccagccggatcgaggtcggccgcacgccgcgatacacccacgtcaccggtaaggaggagctcgcggtctacgcaacggcgctgattcgtaagggcgaggagctgctaggtgaatgcagaggaggtctggcacctctgacgctgtcggaggaggcggagatgtccggcctcgacagcgagatggttcgaacggccgctgcggcgcgagtcgcaccagtagtagacggcccggactcgcttaatcagggaacgacgtctacttctgttcaggctcttccagtcggtcgggcgatgcgcgatttctcaacggtccggtcaacgcgcctcaagaggaacgtaatcttcctcggcccggcgcgattcgtcaacgtcagttcaacgccctgtccgaggcatgacgcgacgcacccccttgactgcggcgttgggatttcacgcagcacgactgcgacccgaatgtcaacctcaaggctgtcgacagcggcaagtacatcagctttgccgctttgcgcgacattgagctcggccaggagctgacgacgtactagtgcgtcgcccgccatcgctttggcctggcttcggccaactgctgatcatttgccctttctctacagcggcgacgactactttgggccggtcaatagcgtgcgttgcgattgggcaccctgagaagccttcgcgtgctgaaacgctgctctcttcctcaggaatgcctctgcctgacgtgcgagcagcgagggcgcggtttctactcagcgccgacctcggcatctgcctcgccggcggcatccgatctagccgcagagttcaatcggcggtcaaagtcgactcgcgcaaccacacaggccagccgcgggccgatacctcttgactcctttggctcctcatcgtcctccagctcgccgcaaccacccgatgcagaccgacagcatcggcatctcgtactctacgaggacgcctggccgaaacgacctcgcgccttccatccatcgacgcccgaccacgaccgacctttcgacgcgttggcctcggccctctatcgcgccatctgcgcgctgccgctcgatgcgatcccgactggccgagcagagcccgactttgtgtcgaacagcgacaacacggacgatgagaaggcgcttcttgtcgctctccctgcggtcgagcgggcggccatcagcaagatgcgagagaaggaccgcaagcggcatcttgcccgcttgcgccaggagcgccaggctcgcgccaacggcgtcgccgcgctgttctcggaggacgaggacgaggatgagggcgacggtgctggctcacaaggtcggcggaagcgaccgagactggcgccagacgatgactgggagctggaagaggtggtgctcagggtgcgtcatcttgattgcatccgcatcgatggggcgagtgctgacccccaattgcgcgacgcaggacggcgagtcgtgctctctgctcacgggagtcgtctctggcatcaccatcgctcgcactgacggcagcgccgcatacccgtgcgtcaatcgtcaacgccttgccgtgtcacctccgcgctgacgtgtccacgcccgcctgcgcaggcttgtcaacttgacgccccttctcaaggtcagtctggcgctcatctttcacaaacacgctcaagctgagtcgttggccctccgttcatcgcagctcggcaacgtcaagaagggcaagcagctccgcgccgcgctactggcagtgccgcgagaccacttcactctcgaccgcgggccgccttccttgcacggaacttggtacgccccttctgtccctctccgcccggccggcctgtactgacgcttgcggttgcagggtaccgctctcgttcgccgccgactgggccaaacgacgtacggctttcctcctgccctcgtccctcccagacggctttggagctgacccgctccccctacttgcgccctccagacggcctcctgcccgcgctcgagggctttctcgcgcccgagccgacctttggcacgatcttcatgtgatgagccctgcttcgacttctgcccgggttgagagctgcctgcgtctagcgagggcggatgaccaggaccgcggaatcatgtcaaggtggccaagtcgcaaggtcaacacgtccaagctcaggcgtgcaacagacaagggcgaagacgcggcgcaggagtcatgtaaagcgacacagcgagcgagaaaaggagggggggggggcgaagcggtccaagtacctcggtcgcaccgccacccctttcttccctctcgttctctctaccgccggcaccctctcccccgcctctgtccccctcttcgaccactggcgcgccctcatgccgtcgtacggtctcttctcccgcctcctctccctctcacttctccgggcgcgtgctcgctttttcgccttctaagttgcgctcccttcctctgcttccgtctcctcccctcgtctaactctcaaactcctcgcctcccgtccatagacccgcctttgtcattgcatgcccgttacaccctaaccctgttcgtctctgtccccgtccctggaatgaccatggcaggccaatggaatcgaagccggcccgtagctcgggcggaccgttcaagtcgatcgcgagcacaggcccgcagtcatgctgacctcggtcgaacagccgacagtgtcgtgctggaggaggagagcgacgtcaaaagattcgccggtgaacgtgcgaccgtcgccctcgccgtccacgatgattttggtctcgagcagcgttgcgatgcgccttccggtctcggccggtcgttcgatcggtagctcatgacttttgcgtaatcctcgttggagagtaggagcgcgatcaggtccgacggcgggacataaagatagccggcgcggtgtcgaaccgggctatcagcgaacagacggatgcgcggctgtccttagtggcgcaaaacgttagaccgataccggggtcgaaccggtgatctcaagcgatcaaagtgaatcggaagcttacgccataccactaggccaatcggcctgattgactgcaaatcatctttcaacaaagtgttactccacgtcccgaagtgtgtgtgaggcagccgtaacgaatcactcgacctattaagcaataggtgtagggataaagttgtgtcagtcttggagtccgaatcatattcagtcctggacgtcactagtccgcaaatatgagcgctgacgtctaagatgacccccttcagccttgccgagggataatgcgtgtgcaccaatggagaaagactcattcagccggcccagtctcctagaagaggctccccgcagcatcggatcgcatgttcggctggatcaagatgcagcaatgatccgtggcctcgtcttcgcagaacgcccagctcgccagctcatctgggtttgctgcatcgcctcaaatcgccacaaatgaaacacgtcctgttcaaagactgtccgaaccaccgctggaccgaactttatctgtaagtgttggaccgacatcttgctacggtgattaagcgagaagacggccgggaaatctacaccctccaagatcaccgaaccgtccgtcactttgaggctgtcgtgcgtcgagctagatcagctgttcattgactctgtgaggagaaataagcggcttcccgcgtcgttcatctcgacaggacgttcttgttttggcaacactcgtcttggacccacccggtgcccggttagagggcgaacggggtgtcgctgtaggcatattcgagtttgcggtgagatcgatagaaatcaacttcttggcaaagtggtgggcatgctcaaaatgatctttgacgcaagtcaaccgcttcgactcgggttcgtagccgaggccgtttcgagcgaaatctcttcagtgataacagagtggcagagccgtcggtcgggagcagactgaggggaggtgctgcttgaggtcggcggccatctcggctagcgagggccagctaaagctcggcgcaagtaacaatccttgatgcgttgcctgataaagcgcaagctcctcgacatgctgtagacgtcacatatggctgcacccctctcgcgccggagaggtgcataacgagctcggccgagtcaatccgggagggagaagacctggatgttggtcagagcccggggcgtgaccgtcgagcgcctcgagagcccggagggcgagctatgccgcaacgggtcatggtccaaaccgggcggcgatccgaggcattggggacgatgcgacctgcgcaatcaaacgcttgcggccctcgatcttggccgccgcgaggtcctgacagcccttggcggatgaagcctgcttcttgaggcagcgctcggcaggcagcatttgattgggcatctgcggcatgtgacggtggcgatggatgcggttggcgtcggaccgcggcggtctggcgagcaggagtagctgtggctctatacggagcgccttgcacgccgtgcaaagtccggccgcatccagccggccgctgcacacgcactgccgcgctcagactctaagcgctcgggcaggtgggtgggtggaccagcgatagctaccggtcgtgtgctgaggcgacgtagtctcgcaaggccttctgtcgctcggtctcgtctcagcacatggtgcgtctgacttacatcatactgctgctctggccagggtcagggagcgctacaccacggacgacttgtcatatggtcttgggaccacccggaagagaatactggtatgtcctgccggtatgatattggggccgataatgggagggtaccaccaggtataccagcactctaccagtagggcatactggtatcactccagcatggtccgcccagactgagcgcagaacaaagcggatgtcagtcaaacttggtgagtgtggttagcgaagtatccggaagagttttgaggggtcagtctgttgaacgggtgagaaaagtgaaagcataatggtaggctaccaggatggctattggtatgctaccagtatggtggtccctggtatgctatcagtgcatccatctgtcgggcaatgtataggtgtgcaccaggtcgtccgtggtgaggaccgggcgctggagctttccaagttatggctgatcagagagtctccacacggaccgcaggttaacgaccccgacgacgcaagccctctcgcaagccttcggttttctatctctgaattcgggagcgtagatgccaatgtttgcgttcctcgggcgccgtgttgatgcgagaccgttcgtcccgagctgatactgcgcccttgactgcggacaaatccacctggacaagcacgcccgcttcgcggaccctcaagtctgactgaataccttccgcccggcctgtttctacctggtttgtgccggcaatgtgctgctgcctgcaccgatgcatctcaggttcgagactctttgttgctcgctgtatggactggactgattgcgggcctcgctggtcaagacgtgcgaaacccttaaagaaatctcgcgtcggctcgaccagctagtcgtcgccctcgccaattttttgatcgccaacgagatggcagccgtggaggtcttgtggagtaaaggcgccttcgatcacatccgtcggcgggcgagcgctgctatgtgagaagtcagtcctcctcgacacatctctactcagcgcgctcggctgaactccttgtcaggccatcccggccgtgctgctactcgagcaatgtgagggggaagaggcatcattggcttcgagtcggcggcccgccttgtcgcatgggcgttgtctataaggctcaacggcgccgagtggaggcagccgagcaaacagaggttgcgctcaaaccgttacccgggcctgccgtctcctccgacgaagcatcccacacccgctccccgccactcaaagccccctccagttgcttctgataattcaggcaggagaagtgacaatgaacgggtgctcctgcatgcgtacggcttagaggatggtctgaggccaggcgcgttgctcgctgctgccgcctctctcaaccatcacctggcctctcgccccatgcttgcccttattgctcgcctctcggtctcgatcgctctagatgcccgtcaggccgtccccggcaaggatcttgtactttgaagcggttctgaagtgcgttgaggagcaatcggcatgggtcatttgtatgtcaaccaaccgaccacgagcttgacccggccgaatataacactcaattcaaaaagctggcttacggcaaggggcctcgagatggtacgcgagacgctgattatgtgctgaacctggctgtcggccttgccagaatggtcttcaacctttatgtcatacctgcttcaccgtccatctgcttcagcaaggaagacgctcagctggttgcatcattacagtgaaggggctccaaggacgagccgaccgatgttgactaccgcgttagcctccctcacgccgcctcggatggtcaatcttagcctactgccggccggaaaggtcagcgcctcttcactcactttgaaagtcatcttccatctcccgagcagtggtccgagcgacaacagctgactcgatgtcgacgttgccccgcccgcattgtgcactcaatcaaagtctcatgatccaccacttataaatccactagtgctttgctgactcgtcagaggctagctcaacgcctggtcgagcgcgagagggctttgaagatgaggctttctggcagctgcgacggactcataggctgattcgttgacctgatgcgcttgcgaatgggtcatccgtccgctatgatggatgaccttgactgacgtctcttttggtggattcaatcgacagcagcaacaccttttcgctaagtgcggtctccgccgcagtcacttttgtctcgcctactcggctcaactaaaacaagccggctcgttagcttaccgtcctgccgcggttgtcaaagatagccaatagcatcatcaacaggccctcaaccatttcttcaacatgctcacgcccaaatgagcggcttgaccggccagagcagtggtgtgttccggtttgaatcccttgcggtgtcctcaaccagcggagaggcttgcgcgcccggtgagcgacgtcaagctcctagttttgacatcaagcagaggagtcattccccgagccgaactgactcacgtaaagtcgttcaaacaaagataaaagacagtcagttttttgcggcatttggtgacccaaatgactatctactcttgtgcctttctcagaaacgtagctgtgcgcgtacctatgcctttatcaagttgtttgacactctgagctgtatgcttcaaaatttcgatgcttgaacaatgtcgcttgctcgacgcttttcctacaagacttagatttgactttgcatacatcgaactgtgacgaatttatgcgacacggtggtacaaaggtatgaaaagctcacactgaggaataccacttcagcgattgaacaaaagtcagcctccgaaaatgtgccgattgcatgacaaaaggtatcacggtacgcctcgattaagtatcatatctcgtcaaacaaatgcgaaagcgccccatcgcgtaagaacggggggttatgagtaatatatattctgattgttgccgccgatccgtcctcttagcaatgacgaatgacgaaaataatatcgttgtgtgcgtggtggtgggaggtcagcgagagatgggttatgtcaagcgcctgctcgcatacgtacgaacatgtctcaaaagccaagaatacgggcggttgcttgcctacagtaacgcagacgtcaaaaaggttgaccgggtttgagtctggaccgcagtcgatttttgctgcaaatacgcataattgatcatcagcgagagatagctttgagctgtcaaacttatagctttacgtgttgatgccttttgaacgtttgctgccggccaattgattgctcttgttcattcacaaaattcgcgatcgtcacctacccttgcataagatagcaaattaaaatcgaaggaagccagtgtgttgtcagacattcagagtagtaccagcataagccagcaggacgaaaaagacctgccgttataggtggccgctcatctatgaacaagatgctgtgtcgacggacactgggcctgcaacaattgcaaccgcgcccatggccgcaacgacgaaatggtccgggattgaccaattgacaatacagtcttctaccggtcttgtcctgttaaacaaacgagctcaggctatattcgcttcaaatgaaggcggctcagttaagcggcagctgcgaaactggacgcgcagttgttcgtcgtcatgagtggtgtttgcgcccgctcggcgagatctctttgcccggaggtgacaatggcttggactagctagctatttgttgacggcatctgccccgcgacgacgacggccacaatcgctgctcatgaaagttgcggctggcaaaatgccgccgctttccgttccccctagcctgcgcttggcgttctgtcgcccaatatggcgggggacatctcaactttggcaaatagcattccaagtttcgcacgggccaccccacatgtggtaaaggtccctggccgtcgatcattttactcgacaatctgcgtttacgaagtgggcttaatcaccgtcgatattttaaagcgacgatgttcggagagttctggtccggccggcaccgagacagaagctgcgcctgactcaagacctatcagagtgacgctgcggtcggggcaaacaagaaagtcacggtctctgacgctgaggatgaagaggcctgtcaaaagctcaacgatgagccgcttactttgccactgctgcggtcgtggtcgtcctccagctgcccatcgtcggagtcggcattggcatcacagatagagctcaaaaccagcgactagagtttattctttgccttctgcaagtgggaagattgacgtcgttggcgcttgctgctttctttctctgacaagaacacttcgtgtgcttgctgcttggcagccgtgtggttgtggtgccgcagtaccgtcagaattggaccaagtatcttctctatcacaagtacaatgatagagatgtctgcatattgcaggtcatcgtacaaccaagagcatccatccttagtcagcgcttatctgccagcaaagagaaaggaccaaaggaccgactcaactgtctctggctcttcaaacgatcgtcctcgtaatttaacaggtaaactgctgggcggtcagtcggccagtcgatattgcccttttgccaagccaggctgattggctttaccgactgtaatctcgcgtggcaggatcagccgctttgcaggtggctgaaagcctctggaagactttatgactgctcaaggtcagcctcgagacgcttacatgcgcgcgcgaacggcggtgtgcgtatcatgcgttgttgccatctcccgccacttcacacgaggtctaataattcgcgcctcgagatagttgtgcggccgcatataggaccgcagcagcgcagccgaagggtgatagacttcgacaaaattggagccgccttgccatcataacccgggcaggaaacgacgcgctgcagatcaggtcgagtcagtcttgcgacgatcaaggacggcagctcgagctggtcacaaagatgcgtttcgtcttccgggtggcgataaaccgctcatcaggccacatgacgccgtcaatgccgtgactacgcggacgttgccgcctcctgcagccgctgcagggcaatcgagaggcgatcctggacagggcttcgtggacgaagttgatggtgtgcaacttggctcgcatcccgatgagcgtgctgcagaatcgctgctggggaggtgagagaaaacaagattcgatcggtcgttgcgtaggctacggacgacctggtacacacctatacattgcccgacagatggatgcactgatagcataccagggaccaccatactggtagcataccaatagccatcctggtagcctaccattatgctttcacttttctcacccgttcaacagactgacccctcaaaactcttccggatacttcgctaaccacactcaccaagtttgactgacatccgctttgttctgcgcttagtctgggcggaccatgctggaatgataccattatgccctactggtaggatactggtatacctagtggtacactccttcgggtggtctcaagatcatacaccaggtcgtccgtggtcagagggtcgggaagggtgtcagcgaaatcctaaaagctgagggacttatcgagttcgagcgtgcggctgcgacctgcagcgctcaatgtgcggctcgtcgctcatggacccatcaattgagggactgacttgcaggtcaagtgatgtcgatcacattcatcgactggcaccgtaacgtccatctgaatttgatgtaagtcattgttttacaaattggcccgggcacgcgttgctagtggtcaacttaccgcaaatttccccgttgatggtggggagatacgtcggcggatggtcaatcaaggcagctcaggtcaattgactcaagactaccgataattgacggtgggagctagttgaggggttgctggctccctgaatcgatgtgtgccaagggcccagcttggcgagaccgtccgaccgagatcaggcctctaagtcagttgacgtttgataacctcgtactttaaggttcaagggctgtggtatttcacgggagcctcacttgaggagtaggaccgggctacatttggaccccgtccgaggacgaaggaggaagggtcacgtccgggggttaattgaggctttgcattttgccaaatggtggttcaccggactgcttgaatctctattccaacccattcttggtttggaggggtgcttaccttttgctgacagagctcccagactcggtgacggccgcggacatctaagccttttcgagtttggcgcaaccggaataagagacgcggtcagcgcgtatcgaaaaggcggaaagagagagcgccccggggtaaagatctttggcggctcgccgcccagccgcccctgactctgagacttcctcttgctccgagcgctcggtcctcctaggaggatccgagcacccgacaagggcgctggctcgccacagggcactggcttatttcagggcgttggctcatcacagagcactggcttctgctcaggaaggggcgcaggtgcaaatgcatgcgtgcctggctcgatcgatcggcctgacgccgaggcgcccgcgcgcttgagagagcatcaatacgattggaagctctttacggctctgcgccggcgtcggcgacgaaagggttggggcttgggcggcgagcaacgccgatcgtcgacgaggctgggttgtcgtggaagaagccgagctacggaggaagcagaagcgggacaaccgaaggcatgagaggccgcgagtcgtgacgtggcgagaaaggcgagaagcgcagacgtggccgagtcgtccgtggtcgggcaccagtcagtgggcgacccggaatcggagccagccggtcaactcgctcgcgacagctggagagggggccactccagaagcggctgaggccgagccgtcaggttaggcaggttcgctgtcgccgtcgatgccgagtcagtcgagttgctggcggcgagctcgaaccgcccggtgaatgtggaggtccaaaatgttgtcagtatcgggtcttacttgagaatggggtcgaatgcgacggccagacgcaccttttcgacaggcgagacgctcccccctgatcttgtacatgaacctcgaccgtccgcacggatatcaagaaaacacttccttagcttggcgagctccctacactggaggcccgcttgcaatttctttttggcacacggccgtcgagccagtacatatcagtatggagtgagttgcacccctcgagcaagtcgccaagttaaccagcgtccccgtaaatcgcctggaggtctttgcaaactccaaacggccttcgcaggtatcagaggcctcgcccatctcgatgcccgcctctttcacctcgcccagcgcaacgttactttcgccctgtagccagctctgcgcaagcttgcaactagtatgccgagggatacgcttgcaaacggccgcttcgttatgccgacggcagtccgcctacggcctggacgacgccgagctcgacgctgttcgctcgtcctcgccgacgacataccttcagacgcagcctcacaagcgcgcctcgacgcatggaatgactgttgcgccttgtgggcccgtttgcgtctcccagacggccctttcgcgctttgtcgtggcgaggccgatcggaggaacggacagatctcctcattttcggcgagctccttcacatcctattcctctttttccatttaattcgcctactatccggctgctgaagagctgctggacaagcaatctctcttatcgccgagctcctctttcaatacctcgccgacgagtcatccagtcgcactggtgcctcaacccgcgcaagcattgagccagggccccgtttcagctcgagctcctcctgtttaaagcgcgttcaaggtcacccaatgacctttgaacacattattgagcgcatcgttgaccacgacgactttaccaacgtcaaccggcagatgcctttggagtatcgggtcgccatctggctctggtctgtgacgcaccacgacgccctcacgagctgggccgagcggtacggcaaggggacggttctcaatgccatccattgcgtcacgccggcttttctcgggagcggcgtacgaaaggaggtcgagaagaggctgtttgctggccgccgctggctcggacgcccgagaggcctcgaagcggcggctgcccagcgctcaaaagttccatcctggtcgggacggtgttgctgtatcgacggccgccttgtcagcctcgcgcgggagcatcatcacgagggacgagcgttctatgaccggttcgtcagccaggattctaggttctgctgacctgtagagcagcctcctctccctcgaaagcagtcctgttgagcgaagaacggtagggagtgagtacctcagtcaccaagaagtggatcatacataagatactctaggcacctgtttagcggaggacggtacggagtgagctacctagaaagtcaggacgtgttacaagcggtgatcaaaggaggagaatgttggagttgcgacgagtgcggcgtggcgcgcagagccagcggcggcagcaggcggctgcgcgcgcgctggcgaccgtgcgcctgccgatgcactcctgacgcgcggactgcatcggcattcctcctcttttctctctccctcttagcttttcccttcccccccccctcccgttccgtagaaacctcagtccacttcttggtgactgaggtcagtttccacctttcgcctttttgctcaccgcttgtaacacgttctgacccccactctaggtagctcattccgttccgtccttcgctcaacaggtgcctagagtaatccatgctcagtccacttcttggtgactgaggtagctcattccgttccgtccttcgctcaacaggttatgagcccatagcttcatcccgaacctaccgatacgctaccctgaacgctacacgacacgacaagtcacgcgcacgtcaccaagaagtggttccgtccgccccatctttcgccagctcgccgagttcgccccgacttgacctctcctacccacctccaccccaccgaaacgaccccccgccatgtcaaagcgggttcacgagctcaaaggagctgaggactaccagcggtggtcgctcacgcataaggcttacatgcagagtgaggggctttggctctactgcctccctgccccgctgccctcctcgccctcgccctacctcatccccgagcccgacgtcgagaaggatcccaagggctggcaagagtggcagctcaacgtccagaaggccgtcggcaagacccagctcacactctcccgcaacatcaccctgacggccgcccacgcggaccacccggtgcacctgctcgcccacctgaagacgctcttcgccggcagctcgatgtcggacgccctcacgcttcacgaccgctactcgtcgctccggtgcgtggccggccaggccgtccagtacctgaccgatatggccgagctccggtcccagctcgccggcctaggcgacgtggtgtcggacgacaagcatgcgctctcagtcgtccagggcctaaaggatggtccctacgacgacctccggcggcgcctcgtcgacttgctccacctcgagcccgaccgcttctcatacgcggtcgtcgaacggatgctcctggcccggtcgcgcgaagaggaggccgagcgcgtcgatcaagccctggcggcgcgcatgagcggcatgcgcatcaagccccagggtcatggacaaagccgacagcagcagcatcagcgcacgtccggtccacaaggagggacgtcactcgccggttccggtcggtgctttaactgcctacagttcggccacttcaaggtcaactgtcagaacccaacctccactaccgtccctgtcggacacgagacgaaggaggcttaccgagtccgagcggcggctcggcaggaagctcgtggaggggcgcgggcgagcgcggcgattgtagctggcgacgtggattcatccgattccgagtatcacgtcgtcagttgcgctgcaagctcgttgaggggagaggcggccctgcgcgctacaagcgaggttgtcatggcggcagtcgccgaaggaacgacgtacatcgactccggctgctcgcggtcaatgtttggcggggccagctggttcgacgccgcatcgtacaagcaggacaagcgcaagatctttctgggagacggtcggtacattgagtcagtcggcagcggcacggtcgagatgcaggccggatcgcacctggtcgttttaaaagactgcttgcacgtccccagcctggcaggcaaccttctctcggttgctcatcttgtggcctcgggcgtgcgctgcgccttcgacgcacgcgggtgcgtcgtcgagcgggctgggcacaccgtcgccgtggtgcccgcacgatcgtccatgtacgcctgggacgttcgcccaggcgcggtcgtgtcagccgttgctgtcagcgcgtcagccattgacgaggagcttgcgcaccggcggctcggtcacgtcggtatcggtcgagtccgtcagacggcggcccaggttgacggcttcgagctgacgccgaaggagatgtcagcatgcgacgcctgcgtcgagggcaagatgacgcgacgcactttcaggcctgcgtcggtcgctcggggggcgagccgaccaggcgatgtcgtctcagcggacctctttggccccttaccggcgacggcaagcggccatcaatatggccttgtcatcattgacgacgcctctgccctcatcaagctttaccttctcaaaaagaagagtgaggctctggcgtgcttcgagcgttttgtggccgagacggaggtggcaggtcatcgtgtccgggtcctgcgttcggacaacggtggcgagttcgttagcgcagcggtcgactcgtacctggccggcaaaggcatcgagcgggccctcacctcgccgcatacgcccgagcaaaatggtcgtgccgagcgtgccgtaaggacgatcaaggaaggcatgcgaacggcgcttctccaggctgggctcggtcggtcgttctggggcagggccgctcggtcgtttgtctatgctcggaaccgctcggtcgtcaacggtcgcgttcctctggaggccgcctggacggggcagaaggcgagcgtcagcttcctgcgagtctggggttgcctcgcctgggtccacgtgccggcaactgaccggccgagtcccctttcgccgaaggctgtccgcggcatttccgtcggctatggcggagacgagggcggcgcggtctcgtcctggtgcgtgtgggtgccttcctaaggcagggtcgtgcggtcggccacggtcgcgttcgatgagggccggttttggtcgacggtcgacggagagggcggcgacgccctaacctgggacgacctgaacaaagatgtcaacaagctcgacatcagccaggcaccggagggcgagcgggacgaggaggacgacgcaccagacgacgagagcccgtgcaggcattacgacggcgtcccaaaggtaggcgcacaaggagatggggtcgacgagcagaacggccaggacaccccgtatcgagctgccgagccaggaggagacgagtcagctcctgtggttgtgcaagagggaccggagcctgtgctggcgccggccggggacgtaccagggccttcatcgtcggtcgggtcggtcgaagaggtcgaggtcgagggcgccggtcgcgaccgcaaccggcctctgctcctgcccgatgcccctccaagcagatgcctccttccggccgacgagttcggaggcggcgagggagacgattttggattccggaggtcaccaacccctcccgcaaacaaccgagttgaccctccggagatttccggcgaggtcctctccgaggatgagatagtcgcagacgaacggccgtcgagcgatgctcagggccggtcggaaggcactggcactgcaagtgggatcccggtcgaaggccaaagaggtcaggtcgtcgtcgcacggcgcaacccaacacggtcgaggcagaggcccgcacgctatcggacggaccaggcaggccttctcgcggacgacaacgcagtcgacgaaggaggagagtggttgaaggtcgtcgacaggtcgttggagggtggggtgggtgtcggcggggaaccgtcaacggccatcctgcaggcccttttcgccgggaccgaacacgcacagccggtcagcttcgacggcccatgcgtagcggccttcgtcatggccctcgcagcagctcaccaggcgggtgtaccagagcgactgaccgaggcgctgaccggcccgaacggccccgcctggagggtaggagccgagctcgagatggcgtcgctacacaagcacaaggtctggacactggtacccaggccgcagggcgtcaacatcgtcggctgccgagacgtgcttgcggaaaagaaggacgcacaaggagtgacggttcgctataaggtgcggttcgtcgcgcagggcttcagtcaggtcgaaggcaaggactacttcgcggacgagacgttctcgccagtggtcaaactcacaacgcttcggctgctgctcgccgaggcggcctcccgcgactgggaggtccaccagatggacgtcgagacggcctacttgtacggcgagctgcaggaggaggtctatatgcgtcagccccctggattcgaggagccgggcaaggaggactgggtctgccgcctacacaagggcctctacggcttgaagcaggcggccaggcagtggtacctgaagctgcacgaggcactcacctcgattggcttcgagcggtcgacggtggatcagggcctctactcgctgcggtgggaggaggaggagctgcacctcgccgtctacgtcgacgacttcggcctcttcgcgtcgggcgtcaagattctgagcgaggttaaggcgcggattgcatcagcattcacggtcaaggatctaggcgagatgcgcttctgcctcggcatcgaggttgtgcgcgatcggtcgcgaaggacgctccaggtctcccagcggccctacatcgagcacctcgccgccaagtaccacatgacgtcgccccacccggtcgtcatcccactcgaccccagcctggtcctgaggaaggcccagagcccacagacggacgaggagaggagggagatgtcgggcgtaccttacgcccaactgctgggtggcctgctgtgggtgatgctggtcacccggcccgacctctccttcgccgtcgtccggctggcccaattcgcggcctgccctggcaagacgcactggtcagccctgaagagggtgctcgcttatctcgtgacgacgaaggaatgggccctgacctacggcacgggcgggagaaacggatcgacgttggaggtctactcggacgcggactacgcctcggccgacatcgacggccgccgctcacacagcgcttacgtctccatgctcaacgggggcgccatcagctgggcatccaagaagcaggagagcgtcgtactatctacatgcgaggcagagtacgttgcgctggctcatgcggtcaaggagacgatctggctgcggtcaatcttggcgtcgctgcggcttctccctaccggcccgacgacggtctacgaggacaaccggggcgcccgagcgctcgccatgaacccgaactcgcacgcccgctcgaagcacattgacatccgtcatcacttcacgcgtgacaaggtcgaggatggtacggtggtcatcgtgtcgatgccaacgaaccagatgctggccgacttggggacgaagctcctaggtcggctgaagcatcagctcttctcgttcggcatgggtctccgggggcacggtctcgccccctcccatccggaaccagagggagcagaggtagcagacgatgcagctcgtcgagagggagtgttggagttgcgacgagtgcggcgtggcgcgcagagccagcggcggcagcaggcggctgcgcgcgcgctggcgaccgtgcgcctgccgatgcactcctgacgcgcggactgcatcggcattcctcctcttttctctctccctcttagcttttcccttccccccccctcccgttccgtagaaacctcagtccacttcttggtgactgaggtcagtttccacctttcgcctttttgctcaccgcttgtaacacgttctgacccccactctaggtagctcattccgttccgtccttcgctcaacaggtgcctagagtaatccatgctcagtccacttcttggtgactgaggtagctcattccgttccctccttcgctcaacagagaaaggtgcactgacctcagtcaccaagaagtggactgaggtccctatggaagggaggggagcggcaagctaagagggagagagaagagagtagaaatgctaatgcgttccggccgccagcgtgcacgcaaccacttgctgccgccgatctttctgcgcctcgcgccgcgctcgtcgcaacccaaccaaagcttgttcaggaatcctcggcccatgatgcacaaggcctttaggacagtcagcaactcagcaggggcattggacggcaactgacccaagagaaggagaggaaaaaacggctgcagtgtcagcatcccgcccgcgcgggaaggacggcgagaggagaggcgggtgaagactcaccaaacggagacgaccgactcgccggcgaatgaggcgggaccggccgaccggcagaagactgagccgtcagctgcgcaaggcctcggaaggtgggcaagccaacggcgcatcggtacacggccgccgacctggtacatcatccttaggtcactcgacatatgtactgtcagggcgtactgatgccataacatcaggcatattggtatggttctagtgtacatcatactagtatgtgtattggtatgatatcagtatgcctacgcctgtccgtcgcgtcagagcctgcttgaggtctggcactgcactatagtccatagggcaacctcagcgcgtgcggtacctgctaaaattcgcactctgttctctctcagggtcgctccttttccctttagagtgttgaaaagggtgcgttatggcggtttcacgggtggttgcccagcgccggcgcgctgcaggctgcccgcgccagcgccctctccccctatgcagtgcttccatgatctataaccgcccgtaccctttcgaccaggcaaaagccactggtaggccttgtatggcgaaaaggtcacgctcctcttacaccttccttcatcctcaagcctgctttacaaactctccctaccttccgcgccctttccccctctcgcgccagagagtatcaaattatctcaagcgtttattcggctgccgcgcgcctgcaaggccgtgagcttcaacagtactggtatggtactggtatggcatggaacacatactgatacggttctggtatgtggtactggtatggtactggaacccacactggtatggcaccagtacaccctaccagtacacctgttaggtgacctcgggatgatgtacaggctcggcggccgtatacgaccgtaagaactgtccccaacgatgacaaagcagacgatacgggtcgaccacgaaacgccgagaggagggacaatagggtggtcctgagcgaggcgagcgtagttgagacaatcagaggggctgatattggcggcctcaggtcccagatcggccgtgagagcgtcggcctgcgtcggagagaagcagagcaaaagccattggacgatcgcgtcgatgccctgtcccgcatcaactgcaacacacttcagtcgccggggcagctttgcagtcaggcaggcgggcagttagatgatccagttcgcgagcgcgggcgcgaggttggagggggaaaggtcgatgttggacgaatgtgggcccggcagcagtcgagccgtgtccaaaatgccacttcagggcttggtggcggctgccgcaaaggtcacattgtcaatgacctccacaacaaagatctcgtcatgtggatcgtcgtctcctccctcgtcgcccccgttgtaagaggagcgtcgtcgccgttaacgtttcgttgccgtccttcgacgccgaaagggaatgccagtcctgtccgctgtctttcgccggacgtaacatgtttgacgagaaagtcaggtgggtcgccggccccaggccactcaacttgccctcgggagcgcccggatttggagggggagacaacgatgacacgtcctctttgaatgcgtcctttgaaaacaacagaaaataagagcgtcaatctaaagccccgattgtagattcaacagaagggcgtgcgcactgattgctcttgaaagagaggcaggatcgcgagctcgatggaaaagaggtattggcgtcggcttcggtacgactgcggctgagagacaagaggacgagaaggcaactgttagaaccgtgcccggcaaccaacacgataccactgggccaaaagaccacaatgacgcttctgacagaagcgccagttccggacctatatacccttgaagtcgtgactcatagactcgctgaacctagaaccatgacagtaccccccctgtcaggttcgtagtccagcagtcggatacatagtcaagccccgaactttcaatccttttatgatcagagtgtgtgaccgcagctcacgatcagttgtgttcgatcgcgaactgctggactgagagctctaagccgcgcgaatcctggaagactcgggagtgggacccgtgggattcgaactcgcgaccttggagaagcgtcattctgttagaaccgtgcccggcaaccaacacgataccactgggccaaaagaccacaatgacgcttctgacagaagcgccagttccggacctatatacccttgaagtcgtgactcatagactcgctgaacctagaaccatgacagcaacggtttggaagaagcttggcatcagcaaaggttccgaacgatgctgcgaggaacaacgtggaggagcgtgcgacataaggcgaagtagaggtgtgctgcgagagccaacgatctctgcggctgcagcgatggattcgagccgccgccgtctttaaagctgcccggcccttcataaggaatggcccatttaagtacaaaacacgattcgcgcggtgttcggccagaattgaactccatgagtcgcaccatcagacaattctgcattgaccgcattgggcgcgctgaatcaagtgattagcggccgattaaaaggccaccatgacgttgaccaagcccagcccaatttgctggggcatgatcgccatccgaagggttgcatatcgtcaaggctcgcattgtgtatcacgcccttcggtgtcgatcgaacgtgacccgctaatttatcgtcttgctgaacttccagatgaagcgaggcttagattgggagtaagcggccagaggcggagggacgagccggctcgcctcggcgcattgcgtccgcgcggggctgatcaaccctgccctctcctcctgatgaccccgtggcatcggctgtcgacgcttgttccgttcatcagcgatacggacgggcgtagaagcactaaagatgatatgatcacgccgaaacaagcgactggccgtgttgccggcgctctcgcttgacggcggcgttggtctgtgtgctgctcaggaggcatgattggggtaaggaatcgagatggtgaggggaggagggcaggtcgcactctcgagctgctcgagagctcgcccgggaagcgcacgctctttggcaaggcatccacagacaagaccaccttactccaccctcgctgcaagctaggtgcatgtagcgcctgtcactgatccgggatttacaaacctacctttgagtggattggtcaactgctggcttagccaagtggttacggcggttgattcgaatgcgcacgactatcacctcctcttgtagggcgcaggttcgaatcctgcagccagctgtctttttaatgggcctagaggagcaaagtttttgatgattcacatctccacctgacggacggtggtcctttgcggcaccgggcaaagtcattcttcatgatgccgacgatgggctcgtgcccgaccttctgccgcggagtgtcgaacaggagtcgcactatcaaagatcgacgcgatcggcgggcctgattcacaaagcagcgaatgaggctccctcagccgcatgggacgattcgcttggacgagcacaatgcgtttgatttggtgcagtgggctgagggcgagcctatcgcttgttttagcgcggaaacggagggacgcctctccccatgtgtcttggcagcaggtagggacgggggcgagagccaaagttttcctctgaagaggtggtgggccttggtgtcggggtggagagaggtcggagccgctggagggcggcgtgagtagcgcgatcttgatgcgaaagtgatactgtgcctgaattagaaagacctagccctcgtcgttgcagctcatagcgaggtcgctccgagccttgttatagaaaggatgagattcaggtattcaacctggacgaagataccttgccgttgtcgatgcggcccaagactttcacatcgctcgccgccagtctgttggtcagggtgtgagggagtgagagagtagagttgtaagccagtcgggcgaacagcgaaggagagctaccgcagattcaattgataattgatgccgctgtcgagaaccgctggaggccgctgggagaaaagaccggtgctctaggagaggggagagtaaacgaggacctgcttgaccactgtttaaggggagtcagggagagaaggcgcttgcggagaaggcgtggggggaacgggtgggacgagccgagcccggactcccttgtcattcctgatcctcatccaaatggccaagaagaaacactctcaccgcgaagatagcagctcggtgagagctctccgctgctccgccatgcttcttgctccttattttagccggttacgcatccacgtgtctgatgtagatcggcgcgtcctcggtcgcgacgcctgaccgctgaggcggagccggagtgctgctcctgggagatccaggccgtccggcaaaaagcgagctcacgagcccaaaggccgcatgcggtgagtcctatcgtaattgatccggaaggaaagcaaaaagccgaccagatcgggttgcggccaaccgtttgagcagaacacgcctaaggcgcgtacgtatatcctcagaaggcttgctttaaggaaggcggaggagcgtcgttgcatacccgttagcagtggctggctttcgagcctcggaatgcgtgatcaacgagcagaggacgtgtcccgtgcaagcgtttcctcttcgctcaagactcagacgctatatacagccgctgcacggaacctcacgctccctttggtaacaaaaagggatcaccgatcacgcgtcggctattatgctcttgcagataagcacgtcgctcaatggcctccgacggtcgggcagggtcgttcgataatgcgctctatgaaagtcactggcaaagccatacgcagctgtaacggggcggccgtttctcgaggggacagggggtggggtgagtagccgcggcaacgtagtttcgtgagacgcaagggcgtctgccgccttgaggtcgtcgtgccggcaaaaggttcttcggccttcgacggcatcaaactgctcgggcaggcgcaccaacgcgagcggtatctcgcagacatcgtcaagaagatccaaaggaagcgcggcaaaacgtagttggtctcaagctgtatgagcatgattgaggcgtaacgattgggcacgatgaattgggcgattgtccagccctcgtctttgatgcaatcaattatatcatggtaaggatcacgcgacatcaagagatcgattagctcagctggttagagcgtggtgctaataacgccaaggtcagcggttcgatcccgctattgatcatcctttttgagtcccctccttttgacagcgctttctatgcgggaagtttcagtcggacgcacagcagtctcgtcaaaggaaagtcgattggaagtccaggagttccctttgcgtcctcatgttaccatggccagtggaatacgcattctgaaccaagattttgataaggacagccgaaactgaccaaacccaccggggaggctgacttgtttggcgtagtatccttatgctctattttgttcaccagctctggctgtgcgccctcgcaggtcgaggtcccggagaaaaggacatcggtgcccgggccgcgactgatccacgcccgggccgcgactaatccacattaagggcggcccctctcgtctctcatgccgagcgtctcggccaagtggattgccaatgagagggctctcccctcgccgacttcgtcgtgcactgtctctgttggattgacaagaccattgaggctgaccaatcgacgtgatatttcttgcccgattcagtatttccggcgatttctctgtcgcaatttcttagttcgactgaaaagcgcggttttgacgacaacggcggagacgaacattcaagccgttaccttaaaatcgcaagcgaagattcgagccgcctcctctccagctcaatttaatttagacgccgtcatcctcttcttcgcttgagcagaaggtcttctcgtttgcagggatttttgaccatctgaagcggtcgtttcccctcagattcaaatcgcagcatcgcggaacggtcagccattacttagccggcgcttgtgaacctccagggccatccagacgtcgcctcgccagccgtcaaaccgcgagcaaacagcccggtagcaagggctgggcgtgggggcgtcgtcgaccccgacagcttcgcactaaaccccaaacagcgccaagttagccgatcagataattcccttgacccaagaaatacggtactctgactacaatcttgcttgcgactcatcattttgctcggcagagcaaagatatctgagcagttcggccgagttctacatacattttctttgaaggctcatgagaccccgtcgactcggccgcgttttgacagcaggctgaatctcaataacatcgaggtgatgcgggccagctttatgttgaaaacccgtcatcgggtttgaggaccggccgaatatgcccgcgccgcgagtgggtctcctttcgcttcgaagcatggggatctacgcgtgtggccgaagacatgatcggcgatcggccatggaaaggagcaacgcggacgagttaggagagacgaaaagacgtacgatgaacgatcagccggccctgatcgccgagctgacttgctttgcgactgtcttcttgtcgttaccgtcatcattagttgccttctcgtcgatctagccctcgtcggtgccgggaacgccgatcatttaggcgtgcggcttagcgactttgtgcaaacacaaatatgaagttggtttgcgacacgtctgtatctattccttaattgtctaacggctatgatattcgcctctcacgcgaagggcccgggttcgactcccggttagggattattttgtctttcgaattcgaaccttttattggaggttttgctcgacttgccagacgtcactcttcattctgcgctgacgcttgagatgtttctggtcgacggttgacgtgcgagagaagaaggacctcacgcgctccgtccgaattcagctgccaaacgcagccgctcgcaatagacgccctatatacctcacattgcactggcgtagcgtccgtacgcaagcgtttgcgttccttcattcgtcttggctcctgctatagccgcggcgtcttccataggcgattatacctgataacaggaacagaagtagtggcaggtcatcacgctataaggcagattccggccaaactccgttaacccctgtcgacctcagcaaactccggcaactccaaccgtcggacttcaacctcaagctttccttcgcgcaccccccccccctctgttccctcttccgctccttaaaagctgacttctcgctctatatcctttctgctcctcagaagcaaactgatcagttttcgcgcttaagtcagcctctgcacccttgcctatactccactcctccgtctcttcgcctaccttattcgcccttgacttgaactccgaactctcctcacctcgccttccacccttcggtgtagtcgccgcccggccttcggacctccgccctcggtcgtccccctggacccctcggtcctccggctctccgaactccggctccggacctccaactccgaaacccgactccggctcagcacccaagaagcaactccgctcggcggcgcgtcaaaatcttgacgcagtcaggctggcgactcgacctgtcgtagcgaaaggctgctggaactggcgccgcctcagtgcccgcagcaggcgatctcctcgcgtttcaagcgccacgatagaggccgcttgatcggcgttatgacgccggaaagagctcagatgtgacagtcgccgccgacgggcggtattcacctgaagcggacgccagcgagccggctctctctcaaacggctggcctcagacatagtttccattgctcggcgccagctcgccgtcgggggctcagtgcgcccgtctgtaccatcctgaccattgaggcccttggctcgcttagtagccggcgtcattccgccctgccagagggctgttctgaagaatgccaatgcacgatgagccggctccaaagtagattttatataagctaaaatgaagtaccttccatctcaagtctcatggtgtaacggttatcacttaagtctaacaacctgttggatcacttacgaccccagttcgactctgggtgagactattcttttgaccttttccatgatccttgctcagcgaagagcagagcggatggaacctggcgccgctccaagcacgcacgcacaatgagcaacatctttctctcgcccgtgggtagaagaacatccggcaaccttttgactgaagaggtcctgtctccgaggctaaagtgatactcggcgactccacggagctgagtggcgcgagattccagacggttgtctgcagtatcgaggagaagtctcagaacagcttctagggagaaagcgagcgaaaatatgacggtagagaacaagcagaatgtgctgggctgttggcgacgattgcagctgatccggcgccaagagggcaactccccaggacaggttctgctcttgcgctgaatcagcagacgcttaggcgcgaacttgtatacaatcgaacaaactgcgccagtgcgtcgcatgcaggagctaagccgcttagacgccgacaaggacgtgcagagggtggcccagctcgagccgcctggccggaaggaaagacccgcagggtcaattgccgttggaacggctcgccgcagtctaaacctggagcgtcgatttttgccaccttcgttgctgtttacggtggcgaagagcgaaagcagaatcgtcagatgttgggcgctcgtgatgccgcccctggactacttatgattgcaagcgtctcagtacgtacaactggctcgtcagccggacggcgacgatgaacgccgtctagatcgcctcaagggcgccaccatgtctgccgttcgaaattgaggaaggtcctcgtgcctccaacagcttatacgtcgagaagcgagaaggccgtcaaagaagacgagcgggtttcaaagccgaggatagccggattgcggagacggcgggggcgacgatgccggcccgacatcgttacctccctcgagggtgagcagcgcaaggacgattccgccgagtgcctcccggcatgcagaaccgggaatagagtcaaaagtcaattaccggcaaagaggtggtcataggcaaaatcaactgaccaaagtccagcatcgggttagcgaaataagtggtgagtgaacacttcgaatgagagcgtgctagcggtggacgagatcgatcggcgtcagacgagccgagccccatttacgggccagtcgagcgcgtgtggaaggaggcacgtggttgcggcgcgagtacaagtcagttctctcttgctcctctccaaagcaggccgagtcgagactttctttcttccgttgccgtgccgcagctggctcgcgctgccgcaggccaatcacatctttgtcgtacaaagagatccgggtcgctgtgactcctccgtgatcaggggcgacacggtgtgttcaatcttgttgtcaatgtttcctcaccgctcctgctgagccctcatcgctttctttcgtcagcgatcggcgtgcagcaactcgctctggaggccctctttggcggcctcgagcagtcgaccgcgatcaacattgaccgggccctggtcggcgtccaactccaaatgattgctaccgacttcgtcgcctccctcgccaggctccaccagctaccgaaacacactgaatgctagatgatacacagccgccgcctatatctgaaccggaacatgcaccagtccatacgagtatgcctactggtatggtactggtagggtcgttactattgttataccggtagaccttgtcagcgaagttttcggaagggttctgaggggttgctttgttgaacggcgaaaaaagttgaagacgtactggtatgataccagtatgccatactgtgacggtaccgttgagcgaaggaccatacggagtgagctacctagagtgggggtcaggacgtgttacaagcggtgggcagcggagcagaaaggtgagactgacctcagtcaccagcaagtggactgaggtttgtaaggaaggaagggaagcgaaaagctaagagggagagagaaaagagtagaaatgccgatgcgttccggccgccagcgcgcgcgcatccgcctgctgccgccgctccctctgcgcctggcgtcgcgctcgtcgcaactccaacaggtaccagtaggccgaccagtatcataccaggatgtgtatttctaccataaaattctgcctactggtatattggtacatattccggattggatattggtatgtaccggctcggcggcggtgtagtatggcatactgataccataccaatatttttttcagcttttctcgcccgcccctgagaacgcgtccggtaaccgcgctcaccatactcactaagtatgaatgtcattgggttcgtcctcagctcagggctgtcaaagtctgggcggaggaccatactagtatgataccagtatgccctattagtaggattttggtttgcatactggtaccctaccagtctaccaataacataccggcaggacatacctgtatgcttatcggtatgctaccagtatacctaccagtttccttctctgggtggtctcgatatcaaataccaggtcgttcgtggtgtagaggtaggaagggtactggtaggcatactggtagcctaccagtacgatcccaggtcataccgctgggacataccagtatgtgctggtatgctacagtaaacctactagtttcctcctccgggcggtttcaggatcacgtaccaggtcgtccgtggtgtacatcaagcgctcgccgaatggacacgccatccgggccacgcacagcgggttgacgaagaaggcgggcgacgacatcaagtggcagccgctcagccttaatgagcaatatctttatggcacttcgacttgtatatctccagcatgtgaagagcttgcttcctgcgtcgcgaggcttgcgaccgagccggccgtcttcgaggcctggaggagctgcgcgcgtcgttgcctttgggctgccgtctcggccggtcacctccgtcctcgtctctgcatggcagatctcgaaactctccaaccagcaaagtgggttgggttggaggggagcgggagggtgagaagaggagagaggggcaggtgagggaagagagagcatgacagcagccggtctgcctgacctcttgtaggcctcgagaacgagggagagcgagcgagcacaagggtcccgcatcgaccgggaaagggcggcgagtgcaggaagggtggacgacgacgtcaggcggtcagcgcaggcggtcagcgcaagcagtcagtgcaggccaagaccatcgtgccctccgcccttcacgatccttacgcagaggccagcccgctagtctttcccgcgtcgtccggcttgacgtccaggcagtgagggtggtggcgctcccgtatcgaccggcgctcggcacgccgcctgcgtcccttcacgcagggtcgagctccggccgctctcgcgccgaggacgatgagcagcacgccggatccggcgccggtaggacgtgcgtcgaggcggcgagtagcagcgtgagagagctgcaagggctgcaatgacctgccaaagaggtgctgcagcagggagacggctggcgaggacggctcgtcgagcggcgtgaggcgaggccagggtcgggcagggccaggagagggggcctcggtcggccggccgagctcgaggcgttggtcgatgtaggttcagcagtcacgatcagcctcctccagaccgacagctctggtatgcctgagtcgtgtcgataggacgagccggtacaggaggcgaggtcgtcgtcgacggccaagggagcagcttcgacgcgacgaaacggtgctggcctgccctttaacgaccagctgccaatcgcagcaagacgcccttcgctgtctcgcaaggcagctcgctctgtcggaaagtgccgctttcttgcattcgagcgaccaccgtgtgttctgcagtgtccaggccaacagcatcgaagggaaggagaggcagtcgaccggtcggcagctcggctcggcccgcgccgaaggaccatctgtcggtccgtcctccagcctgagcctgcccgtgcccgagctgacttctgtctgctcttattcagctagcttgcaggagcgcggcacgacactggtactgggtctgatccagctgatacgggtcgggccgtgcgacggctgctggtcagccagcataggcgcgtgtcgttcctgcccgccaccgcaccggttgggcgtcgcctcgcatggctctcgtcctctccaaacgaacagggcagggcgggccgtcggtctcagcgacgtctcgccgaatgcgcgggctgaagaggctgcgcttattcaaggcgtcgtcggggtggtctggagctcgcccgcgctggcacgcagacgcgcctctcggcctcacgtcgctcgacccgctgacccattcggatggggcgctcgcctactgtttgtcacgcagcatgtcgtctgcaggcgagcggaaggctggtcgtcatctcgaactttgcgtacgcgaggctctcctggatctctttcttttcgacgaggacctgagctaattcgtgacgtaccacctcagcgcgtactctgtcgcagcggtgccagcagacgactcggcgctcgtttcttggcagactcatctctctcctgtatctgctcagctgtctcgcgcttccgccaagtctcgcaacggcctccctccgaggaagcctctgcgaccaggtatcgatggctctgacctttgcagcgcgaggcagactgccaacctgtcagggggggttcagcctctgtatgcttccttcacctactctggtgccaagaggcagagatgcggctgtcgttcgtccgtgcctggctgaggccgcgggctcgacgcgtcgcttcggcatcgcaactccgcccgcgctcgctcacatctcaccgtcgctcacccaccaccctccagtcccatctccagcactatgacggcaacatttgacacgctcgccacggtatttgagggtagcatcgtcaccaagagctcggtacgtccgcttgacctgctcgcgcctcccttgggccgcatactgactctcgaccgtttctcgcgacctcgttgccggccgcccttctagcccgactacccgatcgccatccatcgctacttcaagaacgccgagaagccggcccgggtcgtcctctacccggcctcgacggccgacattgcccgcgcgctcgtgttcgcccgggccaaggagctgccgctcgtcgttgccggcggaggttcgtgcttttcctcccggcccttcctttctctgacgtctgaccctggctgctttctgattccgagcaggccattcagccggcggcgcctcatctatcgacgacggcgtcgtcctcgacctctcgcggcacttcggccaggtcgaggttgtgctcgccggtgacggcaatgccccgcagcagcagcagcagcagcagccgtacgtcaaggccggtggcggctcgcgctggggcgaggtcgacaagaaggccatggagcacggtccgtctggtctcccgtcctcatcatctagtcacaggctgaccgcggtgcgacgtcgtcgaaggcctcgcgacgaccgctggcttggtcgccgagactggagtcggcggcctgaccctcggcggtggtgcgaccacgtcctctgtatcttgccgttcctcgcttcactgacaggcacgctgatccttcttgtaggctacggctggctgacgggcgctcacggcctggcttgcgacaatcttatcggcgcgaccgtcgtcctcgcatcgggcgacgtcgtcgaggccgacgctgcgaccaacccagacctcttttgggccctgcgcggtgcgtttcgttctctgacgctctcgttgaaaagaaaactgacgactttctgatggacaggcggcggcggagcgtttggcatcgtcaccgagttccggctggcgctgcacccgacgagtaagcgcgtctacatgcgcttcgcagctgtcccggctgccaaggtctgacgctgtagcagctctgtatgcgttcctctgctgacctcttgagttatgcatctccttgggcaggcgcacgaggcgatcccgcgcttcctcgagtggtcgcggcacgtcgacgagcagacgaccggcggcatgggcttcgacctcggcccggacggccatccgatcgtcgtgtactggggtgcgctctgtcggcagtctggctacgtgcagcttccgcggtgaagatgctgacgatccacccggcttctcgcagcgaccttcctcggcccaaaggctgacgtcggcgagcggctgcaggcgttcgaccagattgaaggtcggtcttcttccccccctgtcggcctcgaacctcgctaagcctgagatctctctccgaatctcgacccaggcttcgccacgatgctcgatgaggaggtctcgtacgagcgcgccaacaccgtcatcggcagctttgagccggtgcggcctcctcgctacttcgcgcgagcgtgtctgggctgaccagacagcgcacctaccaggaggggtcgtgccgctactggtcgtcaatctttgccgttgcgacgatcccggtctacgaggcgctcctcaaggtcttcagcgagcgcaaagccgaccgggaggtcccgggcgcgcactttgtccgtcctttgctctgcctcggcttgttgccggtcgtcttaagctgacctggctgtcatttacgtcgacaggcgctccaggcgattgcgttccacccggccaaggtcgcgagcgtcccggccgatgcgactgcattcgcgcaccgagacccgaaggtcgcgatccctctccgccctcctataaactgcaccactctcgctgacgacctcgaattcattcgttcgcgagcagaagacgatcctccagctcaacctcatctggccagacccggccgactttgatccggccaaggcccagtcgttcatggcctcggtccgggcgctcgtcgtcagcgccgccgctgctgctgctgatggcgcgagtgccgccggctactcgaattttgaagcggacgagagcgccagccgggcagacgacgtctttggtgcgtgtcctctcgtcgccattcgcggtcgagggctctcttcgctgacaggctcccccttccttcggcgcaggatcgaacctcggccgcctgcgcgagctcaaggccaaatttgacccgacgaacgtcctcggcggcaagtttggcctcggtcagcagcagcagtgagcgcgacatgcggagtggctcccgcccaagaaagtcttgcctccatcccgcgcacgcctggtgcggcggacgatccatgcccgtttcccttctactgcccagcttcaaagcaccagccgctcgggattcgggaagacggtcctcccagcgctcgctccaccgtcggcgtcagtcgctctggcagctgccaaagacgtcgaggttcggagagtgagtccgcggcgggaagccggctcagtcttccgccacggagcagcgcagatcgacctgcaacctccgatggcaacgagcgatgtcgaagacggttctcgcagagcagcagggtgagcgcttcgaggaggaggcaggcagcaaggatgagcagagaaagtgcacgtcgcgacgctgcaagaggccacggcggccgtttgcttggtcgtcggcctgctgagcatgttaatgaaagggcgaggaggggtctgctgactcagccgagccccgggcgggccagtgctccgggtgagccgtttcgaagctgggcgacgatcggccctggcgacggcaactgcttcgccaccttcgaccctcttcgctcgctcgccaccgaccctcatctctgcacaggtcgcccgtcttaccgaccttccttcaaagcaaacgcccttcgccccgttcctgggcccatgtcgcacgtacctgtcgcaggcgacagccgccagccgccgcacccgcctggctcgccaccgcgcccgacggcgaccactctcgctgcctcgctcacgcccggccctcgcccggcctcgcccgttcagcagctcgtccaggctgctcggccgccggtcggtcttcgcacacgctcgtacgactcgagcggtcggccaccgaagctcgaacggctgccggcgggggcagtcgccgccgagaagacggagaagggggccaaggcactcgcccactcgacgagcggttcgtcctctttcccttcgcaagcgtccctcgcagacattctttcagcgccatgtccttctccaagttggagctggaagctgatgttttctctgctctcctccagcctcgtcccgtttgacgtcgttcctacgcaacccgccgccgtcgcatacgcacatcccgccctcgctcgcgggctcgctcctgctcgaatcgcagcactcgcccttccaccggcggacgctctcgcgtaaggacccgtcgggcgggccccgccggccgtccttctcgagctcgcactctgacggccggatcgcactcgctggaggcaacggtgcctatcagcagacgctccagtcgccgaccgaagagtcgagcccgcacgacgcctgctcgcgcgtcgtgtcgcactcgtcctcgtctggctcgggctcgggctcgagctcgtccgacgacggccacggcggccggcgcgacagcggcttctcctcgggcgaggcaacctcgtccggctcgtcatccgaggacgacggcggccagacctcaccctcgggccacatcgcctccggcggccagggcaagcgcgagtacttccccgaggactacctgctctcgccttggctcacgccgcaggagtttgacaagtcgacgccgtccatcacgcgccgcgagatggaggcccggctcggtaacatggcgtcgtactttgatcacgactagagggtcgccgtcagagaagcctgaggctcgtcggtcgcccgacttgccgctctactcctccacaagtcagccgcatacacgcccgccaacctactcgcctgcatctctcaccagtcgccaacgtcggccacaaatggtcggccaccgactcaaccctttcgtcccgcgttcggtcaaaacacgagcacctctgcgcgcggccggaacttgcacggcgctcggtccgctggactaggctgccgccatctcacatacctctagctcgagccgtcgagacatccggccaatgaccgcgcccgactatactcgcgccgactggcgcccacgccggcctgccgattcccttcctcaaagggcgctcttggaatcagggccgctttcatccctcacgcctaacgacctccttctccgccccgctttgcggcccgtatcaccccttcgctgtatccagacttccccagcctgccgccttcgtccctcccctccttttgggccggtcctccatgacctttctgcttttctaacccccatccaacccccatccagctgtatcgatcgtcgcccgagtgtactgaatctcttcatgcccacctttcctcttcgttcgcgagtcgttcgcgagtctaacggtggacgcgcgtctctttgtgccctggctcgccgcggctttcgactcggcccgctccgtcgaaggcgatgcttcctcccgaccgcattcctcccttcttcgcacgcctcccgccgcctcgtcgcccagatggacgacaagctccggcgcgagttcgcccacagccagcaggcgacggccgtcgtccgccggccgacgtttgagcatcacccgtcgacgacgtcgctcgccctgaccgagccgcccgaggcgcagctgccggcagctgctcctcctcctttcgccggctcggccttcccttcgtcgtcggcgtacggtcggccaccggacggctatgcccagcctagacagcttgctgtgcctgcactctactcgtacccttcaatctcgtcagcctcgtcgagcagccacccgccggtctacggccgagcgccggcctcgtttgggagcagcatcaacggcgattcgggccgagggctcgaggagggcctgccgaccgtctaccagctagacgagtacgcgccggctcccctgccagagctctacagctctaggagctacgttggctcggtcggcggcgggggaagagcagagggcaagacgtggggcgagccgggacactggcctgacccgggctacggcgctggcgccggcgagcgcgacgacgacgacaagagcccggccgcctcatcagcctggccgtcacatctccctcgagccggcctagccgccccaggtcaggaggcatcgtcgcagttaccctcggccgacccatcgcccgactacggtctcgttcgccccggccggcgctcaggcgcactcggcaccctcggccggacgctccgctcgctcgtcccgccctcggtttcgacccggctcttcctctcgctcgtcctcctccagtcgatcctcgtcctggcgatgctcgttctcttgacgttagagtattaccagctccaggcgggagactttcgatttcttcaggcgacgagcgaacaacggcgactgcccgtctggctcggcgtctttgcgctcgcccacgcctggctctttggcatggccgtcgagggcattcgggcgcgcaacatcattcaggtgcgtcgcttgttcgttggcgggcgcggtcttcagcccttttgtcgcgcgtgctgacggctcctccgccgcttcctgtaccagatctttggcctcgccgtcttcaacgtcgccctcctgacctactcgatcatccagatcagcgagatccgcggcgtcttccaacctcgcccaagcgcagcttcgtcgaccgagccagcctcgaccggcctgcgcgctatcccggtcgagctcctctcggccttgatccctgcagcgatcggcgccggacaggtcggctacaccgcgaccgcctggttcctcttcaaagagtttggctgggagtcgtacgttgcgctcggcgctgaccggcgcatcaagaaggcctttgagaagtacaatgccttccacgtcttgctcaagctcgacggttcgtccctcttagccgactgctcgcgggtgacttccttgcgctgacatcgacggctcgtctcgtctcagtgttcttcttccttggcttctcgatccaggtgcgtctgtcgtggcttagttgggcaagcctgcggcggtgatgctgacgcaatcaccctgccaacccagctcatctacctcgtgctgaagaaggactgggagttctacttgaccgtcgtcgctctgccatcgtcgctccttctcctcgccctcggctgggtctcggccaggcgggagcttcggacaggcatggttagtctgggcgttgcgccggggttcccttcgattctcgactaacctgcttcgcctcgaacgcaccagttcgcgttcctcttcggcctgatcgccggcgctgtttactttgtctacaagacgatccgcatctggtccaacggcgaagcgctcgagacgatcgtcaagtcgctaaccgtcttctcggccctgtcgctagcgctcctgctcgcaacgagcgccatggcgatcgtggtcacgcgcaacttcggccaagggctgaaagaaggacgtgcgttgatcatagagaacctgtcactcgctttggcgaacgtcgctgactcttcgcctgccagtcgaccgaaggcgcgccgtagcgaagggcgagaaggccggcaggaccggtgtcgggctcgatggaggacggttcgtcccacctctacttgctcactcactagtcgcgagcgctcatacatggccgtcggcctccttcccctgacgctccagggcacctctcggccgaaacccttccgacctccggcgaatgttgatcgagtagctccaccttgcggctctcatgttgtaccattccggatccgcaaactgcggagccgtctttcctggctgtacggatctgcttttcatcctcgtcccttcgcgtcccgcagatgaaggtgctgcgcgtccgcgccggccatcgccgacgcccttcaccccggcgcgcagtctcactcactggctttgtttcatcgggggcaaggcagaggctgtatactcgagtggaccatgctgatcatcggttgacggtgcctgctgcgtcggctcggttcggctcctctcggccgcgctgcgattgccctcaggccagggctgagaatagcagggctgctttgcggcgccgcagagccgcagcgccagatcttgctcgctcgctgcagcttcgtcgctagctagcgagcttacggacagggccagtctgataactccgcccgaattttctaccggccgctctgtcgcgacacccatctcctctctcctcccctgccagctaccgacgtctggctcgtcctcaccgctactcaaggaccctgccgatgcccgtccccatctggtcgtccttaaccgctcgcgagcgacgcaacatcgccttctatgcgagcggcattgtcttggtgagcgcatccgcgccctctctgatctgacgggtcggcaatctgatcgctcgctcccttcgtcagtacaagctcggcatgggtgcgcagcgcaacttgttcggatgctgtctggcttcttgacactgacgcaagacctcgcccgcctgcattagaggcataccatggcagcatcgtcgcgatggctgccgaccgcttcggaggtgcgcacccttccgtcgactaatccgccggctcggctgcccatcctgctgactcctttcctcaggcaatgctctcggccgcctcggcctgctcacaggtcttaaccaaggctctcaagtgttcggcagcattctcgtcacccctctgatgaagtcgttcaagacgcgatcaatcctggcgacagtcatcatcatcttcgccttcattacctctctgccggccatcgtcgacgcctcgacgggcggcaagatcaaggccaataacggtggggtcgtcaagtacggctcttggagcccgaacgtactttatccggtacgtgcgcgtccttgacgcccatcccagtatcgtggccccgtcgctgattgatcgcttcctcccgtactccccttccgcagatccacggatgcgtcggtgtgacgcacggcatcgtcgagctcatccggcgcgtaattcctcgagagtgcgttcggctaaccctacttcgcagagctagagctgacgactcgactttcctccgacagcattgtcggcggcgacgtcgtacgttactcctcgctagcaccgtgaaggccgagattaaccgctgaccactcctgtctttcgccataaaggataaactgcgcaaaatggatgctatcgtacacatcctctacatgctggcgggcacaggcggcgcgttcctgtcggtcgtccttctgcagacactcggcaagaactacgccctgttggcaaccccgcccttttttgtcctcgcggccatctgctggcgttcggtcgacggcttcgagcacgagtcttcagcaagtgacagtctagcaggcgtcaaggcggaacgcaaaacatcctacgggcgggcagtgctcagagctctcaagacgttctgccgcgcaacctaccgaggcgcccagatctgcatcactacccgcaagttcatctggcttccgctggcttactcgtgcgtccgactgtgttttagtcctcctgctcggccagcctgctgattgtcttttaccttccctccttcctagcctagcgatgtacgggcaccgctatctcggtccgtgcttgcttggcgcttcaggaactcagtcttgcccacctctctgacctcttcgtctgcacttgcgcgcgcagagttcggcatcgcacccgcgctcgccaagcggcttttgaaggagtcgtcgttctctcaaattatccacactggctcaaacgctggcgagctgatcggcgctttggtcgtcctgatcgtcggccgacggtgcgtcctcactatcggccgctgactggccattgcgctggccgcctgcagctgacagctcgccaattctgcagcgtgccgacgccgatcccttacatccggctcgacgcgctcaccctcatgatcatctgggcgttgccaaccctcgcgcgacacgccattccgcaccaagcctcctgggcctggacctttgtgcgtgtctgcaggcgccgcgacctttgtcggcagctcgctgacgcgcttcgcacacctttcgcaggcgggcgtttacgtgcccatctcgatcggctttgcctcgggcgacgtctctctggcggccttcatccagtcctcgcttgcccgcatcgagtcggaagacgaggagatctcggcgcttggtgctgtcatgtcgtttcttttttccacggtgagtttgagctgagcgcttcatcctttcagcgctaaccggctgacgttgcacctgtgcctaccttggccaaagtttgtcgtcttctacacggtcgcgtcggcgctctttggccgctacgtcgaccgagtctttcgagaggacggcaacatccagcgcgcactgctttaccttggcggcgctcagtacgccattctcgcggccatcatcctgtcggcctcgctcataccaaagggtgcgctctcgctcaacccgccgctgctgacagaggaggcagattgcccagacgatgccgagactgtcggtgaggacgtggaaacgctcgacaagcgatcgtccggctccgagtctgagcacgggcagccgggagagcacggtctcgagttgcccaaggcatgactcaaggcctgatgagcgatctcctgcggccgccctccttgaccatctcatgtccccttctcgccgctgccagcgcacgaaagaaagctcaaccattcgatctgcctggctgaaacgagctgacccggacgaggcttcgtcggacctgctccttgtccctccggctctgctcgcctagcggcctggtcgagaggtcgactcgctcgacaggccatatctgcttgcgtgcctcacttcctagcttcgaccggcgccctgcagacatcagaagcaatgcatgagagacgtcacgaacgagggcgccgggcccgacgacgaccggacgcgtcaagcgagatctctgtcagaggaatcgggaagcgtcagcgcttgagcagtcggtggagagcttgaggtcctcgacccttacccagtttggaggtcaatgagcgcactgcgcagcactttgcgtcccgttcccgcctctacctcataccacgtctgacgagggggcggcagaggccagctgcagacggcaagctccaaattccaatcatctgcttcggttgatgcctcggccggaatctggtagctgccgtgctcgacgaggcaaggcttgaggacgaatgcgccggggttgctgggagcgaaggctggcagatttgggaagagcagggctggcgtggtcgtcggcggcttggtcttgattgagccgacgtcaaaccgagagtccgagaatgtgtcgctctcttgaagggtgacagagtcgatgaaagaaggcgccgagggtagcggaggggtgcccagttcagagcctagcgtgcagccggacgagccgtcggacgcgagcgacgacgaggttgagctgctcggcatcgaccggccggccggacggtcgcagaatgcgtcgatcctggcgagtcgccctggggaagacgacagctccagtgaattacgtcgaccgaagattgagaggtcgaaagcggcaaccgatggcacgatgccgtcggggagaagctcggctaagagagcaacccgcaagtcagtcctctagccggcagtgtagaggccgaggccgtgcgcaccttgatctggcagccttaggaaaggcgagaccgagcggaggtctccgccggcgtgaattgcgagaccgagaccgttgcacgacgagcgctcgagggcaacaatccctctggctgacggcaggtcggatgacgggtcggggtagaagaacggtgggagcggaggcggcgtgtcactgcgactcgaacggtgcaggatctgtttctggatgtgcaagcgctgacgggaggtgccgacgtcgtcgaacgcggacccgaagtctacaggcgcggtcgggttcgaacgcgagaagacgacgcttgccttccgaaggatgtggccgagagcgtcgctcgagcgatgacggcgatggagtgaccgctggcgttccttgtggtcggtagcaggtgcgacatcgaaggcgtcaaggtcggcccagagattcgtcgagcgcgggtcgtccgggtcgggcgtcgcgaggccggcactggacaacagcgaggaaagctggccagagtctgacgataaacaggtcgacgagggcgagaggcagtcatccgcacaaaaaggccagacgtggtgctctgcgcgaggcggccgagagccaaaggacgactgggaccggcggtggtcgtaggtcgcagcatctgctttggcggccggaggctggcgagacaagcggagctggacagaagctctcgatcagtttgagtaagatagcagatgagtgcgtctcgagtgactcacgtcgctgacgcccttcttgacgctcttgacccagtcgccgacggccgaattcggacggtcggcgacggagagccggcggaagctgaagttggacggagtgcgtcggaggctgatgctgctcagcggcggcggcacacgcttcgtcttgccctccttccggcttggagctccgttggccggccgactggcgagctggtggaacgagacacgcgtgttgtccatgtcgcgcgagcagctgcttgagtgtatgcggcagcggggagaggatgctggaggtgacgttgagcagaggatgcgcagagctcggtgacaggcaaaggaatgatggtcaagagaggtagcgcaagagagggaggacgaggagggtggtggtcaggaggaagcaaggtgagcggggtggcgggcagcgagggtcgaggctggccagccgaccgaccgcgtctgctgcgcgccctagacgcgtctcgcgggatgagcgtcagcttgagcctgccagcaggcgagcaggtcgtcaacctgcacgagctaaccgagactatctggtagcaacggcgcgctcgacagtgggacagtgggacgagctgagtagaaagaggttgacgttggcgaggggcatgcaagagtttcgtgcgggtcgtgtcggtcgtcgatcgaaacggtttgatcagagatcgtcggggccgttgatacgcggccggggggcatcagagagaggagggacgatctccgacttggcgtgcgtatctggagcgacgactgctgcgtcttgtgcctcagactccgctgagcgcgcgtccttcgcgccgttcgacgtgactttttgggcaagattctggagggtctggcccgggccggtcctcttgcggccgtagaggatgtcgcgccgaaagtcgctcaacgaccgcttggcagccccgcgctcgtcggcctgcgccttcgtctcagcctttgcggcgtccttctcctcttctagctcgcgcgccttttcgcgatcggcggccgcagcatgcggatgaaggatcgactttttgaccttgccgacgctcttcgacagcttgccgaacttctcgagcctgcgcaaaaacgatcgaggtcagcacaatgagctgcggccccgcggcgacgaggctcgaaggacgtacccaaagagcgtctgcaggatcagcacgagagggggtgcactgatcagccgcggcagcgggctgcaagatggtgcggctgcgacgcacgagctctgctttggtcgcgtggactcgactcaaatcggcaccctgctcctccatctgcttcaggaactccttgaagtggttaatgttcgtccggtagtggcccgagagcgggctaaggctcgtgatgatgccgtggcgggcggtgatgaggccggcagccgagacgcggccgcccgagaggaaggagctgtgctggaaggcacccgtcatcttgatgccgacgaagactggaagtgggacggctaggtcagtacgagatctatcgcgacgacccatcaggatgagccgcaccatgcccgcgtgtgtcactgagaggcaaagacgcatgcgaaacgcagggtcagcgtgccgcagcctcttcgacccacatcttcagataaggagacgcaccagacgtagatccacgtgttattgccgaccgtcttgcggaggaccttgtcggttgcgcccttgaccgtcaaggcctcgaagaaggtcttgactttgctaatcgggaccgggtcgctcgagtggtccttgccagcgtagtgctcagcctcgtccgagaggtcagacgacgcgtccgacgacgaccgggcgtcctgctcctcctcgtcctcgtaggcgtcatctttggggacgatgccgacgtcgggcccggcatcgacccacgtccgcggcgcggtgtcgacgtgctggccattcttgtaccagcgcaggcggccgtccttgcggtcaacggtgacatagtagttgagtcgctgctcaatcgataggtaactgcaggagacgagatgggagtcagccgctgctgttcgctgcctcagcgccgcccagtgctcacgtgatccgctccttttcgagctgctctcggctgcactcgggcaggctgaggtccttccctgcgccgcgatcgagccagcgaaagaagttgtcgcgcgtgtcgtcgtcggcctcccaggccttgtggtaccacttcaggttggagccgtagcggtggcgcccgtcgagcatctcgaggacgtgctggagagggataaggcagatggccatggtcagaggcgtgccgaaaccttaaggcgcctgatggagcaaagaacatacctgctcctcaagagccttgctctgttacgcaatgtaaagaccgtcagtttcgatcaggcggtcgacttgatgtgcgcaaacaacgcacctgcttcgctggcggtcgtgtttcgagggccggcgattctgctccatccttggaagcgtcgtcaatctggtccccgctccccgactcgaaggccttgccgttttggagctgctttgaagcatggagggcgcgatgccagcgttgctcgggagcgttctgcaaagagcaggcgagggacggaagctgctcgtcagctgacgaaggccctcagccagcagcatccttcggcctcgaggcacggaccttgccctgatccgcatcctcgttgcgcttgacaccctcggcgttgaagaggagctgcttccagcgctcgtcggacgacctggacgagaagcagagagtcaggtcagcctaggcacgccgcttggaccagctcgttggctcgacgcacagcttgacgtccgcgtgctcggcccgggtcttatggcccttccatcggcgctggatagaagttgcagcttcaagctcgcgccgacgtcgagcatcgtcccggtcgtcctgcgtgccttcatcggcggttgaagtcgtcgtcgtcgtaggagacgtgtctggctcggcagtcggcgagggccgcgctccgtcttggccgcgcagcggcgaggtagcgctcgagctcgtcgctgcctgctgctcgcctgcagggccttggaggacgggtccgagtccaggtagggtcatcgggaggctcgtcggagcacgacgtactgaatgaattcgggcgaatgggtaggactggcgttgagggaagaaaggcgaggcaaggcaaacagttgtagcgccggccgagccgcctctcgtttgttctgcggatcaacactcgtcgtcacgagccagaatgcaaatagcccggacgatcctcgctcgtctcacgcgaacaggaagggtcccagagcaagaggaccgacagcagaaccctgcctcgctgaagatgcggtcgaggcggaagcaacatttggcggaggcgcgtgcgcaaagcagtaggctacagcgaagacgcaggatcgtcggcatgcgcccgacgtcgccagggctggacggcctgattgacgcaggcgtgcatggctacagcggtcgtagagccttctcctctggctcggcgacggacgatcggctcagagcaagggcttgtcgagcgtccagtggtcggcgccgatctgaaccgactgtgagcccagagggagtcagcccgagtgcacggcaacggctccgagcgcaagacttacatctgggtcgacgccgtccttgaaccagcgctcctcgtccttgatcgggacgtcgttgcctgacatctgtgagcgttcggcggggctgtcagctgcatgcccgcctctgcgaggggctcctgtgctgatgtgcacgcacctgccgacgatccatgcggccgtcttcggcgaagcgcctcaaaaggagtaacatggggaaagagaagagtcagcttgtcgggccaggtgatgggaagagggtgcaagagcgtgagctggcacgcaccagtgctcgaggccgtaggtccggaaccactcgccgttgacgcgcgcttcgtaccagaactgcactgcgattctgttgccttcgtgagcaaagagctgttaaaggcgagattgagcgtcagctgccaggccgagagcgtgtcaggggacaagttgggcagacctccttccgaagcacgtaattgcgctcgcgcttccacttcttcgtcaggaaggcctcgatctcggcgtggcccttgacaaagtcgcctcggttgcgccagacgctgtcgtcggtgtacgctttggcgacggccgagggtgaccgagtgttccacagggcctgggcgagcttgaccttgcgggtcgcggtcgcgagcgtgaagggcggggcgagcgacatagggtgggtgctggcggccggcggcgtgcaagagagtcgtagaagttcgggacgaagagaagagagcaagagtaagagaagctggggttcaaggaaaggtcgggtcagcgtcaaggggaagcgagcagcacgcagcgtccggcttggccggccgtttcgcgcgggggctgctgcgcgccctttcggcttccgccggcctgtaatgtctccggtcgacctggaaacgcctcaccccatgactggcaggccggggggggcaactagcggcactactcatttccaagttcacgaagtcaggtcagctccagcaggccacgcggccgatcacaatagaatcataatgtgccaccatgataggcctcgcaattgaggcgaggagttcgcagcggggcaacggctcagcgggggcggctcgatcgtcgccaaagggagcttgaacttcgacttgtactcgagagggctctggaggaggttcacggttcacgctccaagttcacctcgacctcgccggcagcagacggccggagccgccggccgctcggcagcgggctcgaaaagaataatggtattgcatgaacccgagcgtgaacctggaaatgaggcccgctactggcatgcgactgcgcttgcagagactcagctagggtcgaggagagaaaggggcatgggagcgggcatgtgacgtcgtgagacgagattgaagaagatgcgcaaagcgggcgagagcggagggacgagagcgacaggccgcccgtcgaggctgaagcctggcctgtgggcgtgcgctcatccgtcgtactcgaagtcgtgctcgtcgagccaggtacgcgccctggccttggcctctggagcgggtggagggcgagagagtcagccgccccggggagcgagaccaagcgttgacgaaacctacccggggatgtccgggcgttgtctgcgataagtgcaaacgggtcagcatgctgccgtgctctctaagctttagagtgagggcatactgacggagcgtagccttgtagccggcagcccgagccttttcgtcgggctcgttgtcgacgtcgtccgcggtcgaacgcgacttcttgctgctgctgctggacttgccggcgccggtgctcttcttgctgctactgctactgctgcgcttgctcgcagcccactgcttcggcggcggctcgtcgaatttgacgcccctgagcgagaaaggcgagcgaccgtcagagactggagtgcatgcgcgtggcggaggagcaacgatgcacatctgcttgagcatccgacgcgccttctgtttggcctcgggcgagctgtcgagcggtcgctagtcagcctgcaagggcttggaggagccaaggaaagagcaccgtcagacgagacggacgacgtgtctttggtgagggtcgctctgggcgaggcgcggcggtcaggcacaggtcagctgctgcgccttgatgcaggggccgacctggcatcgcgccggggatcagaaaaggtctcagaaggacctacttgtagctgcaggagtccgggaggagagcgtgatagcgagaaaggcggagcagagcggagatgagcagggggaagagcgaggtcaattgccgcatgatccggaagtacccctcggccggctctggtggaggaggacgaacccggcggcgacacggatctcatgcttctctttgtccgtcttgtcgctcgaggtcatgttggctgaggtagaggcgcttgaggagggcttgctgctaggatgagggtcgactggcggaggtgatcgtcgagggaaggccggtgacgtcggtcgcacgcccgcgcgagagagacgcgtcggccggaccttccctcttcgcgtcgcccgacggctaccgctacaaagcgaggcgaaaccgcctctgaatcaattggaagtggtcaggcgcgatggcagggcgagcctggtgtagagggggtcgtccgatagcaaagcaccccccacctctaagtccttcccaccagcacgtcccgacagcgcccgtcggctgccgcagcgtcctcctttagtgttcgcgctccttgcccttgtcgagcgaaacaaacgccaggtcgccgtcctcgtcttcgcctggtggcttccacgaggacggctccgtctcactcctcgatggcgggccaggatgaggcgtcgtcgccggcggcgcatccactgctgtcgacaccgcgacgacgtcgtactcgaccccgttcgcttcgccatgccggacgccggcgccaacggtctggtcgattggccggacgtagcgctccgcctgcggggcggccgacgtcggcgtcggcgcgccgtactgctcgcccgacttgatacggttgttgctcgtcgattcgctgaggacgcaagggttgagtgtcagcgccgcttctcaatgtcaacgcagtagaaagacgcaccgaatctcggcaatcaggtcgtccaaagagtagaagcctaggggaccgaacgcgcctaatcgcgtccagaagctggcgcggtcgagcgggccgtgcgtcgcatgcaatgtcaaattgggctgcccggcgttcaacgggtcctctgatagacagtcacgaggtcagtacagagagcaaagcgcagaggagaggcaagcggccgggacgcactgaagggcgagacgacgaagccgacccgctcctgaaggctcgaccgcccgccgggtgccctcggcgggaagctcgttgacgacggcagcggcgaggccggcgagtctggcgcaagcgagaccgtcgacgccatcgggctcgggctcgggctcgggctcgggagcgggctgagtccgtccctcgggttgcggcgcgagggctgagccgagggcgggagggcgagcgagtgccggtcgaggagcgtgtgagcgaggacgagcaggcggacgagcagcggcacctgggatgggtgaaagtcgtagatggtcggtagcgggggcgagacgacgatcgtcaggtggcctgcgttcgaaatgaggatgagggacaaggtcggagcgggtcagagcgggtcagtcaggagctgaagctgctttgatgagttcaagcctgcacgaccagcagcggtaacgcacctgccgaagcgagagcccgatccttctcgaggtacacgacacaatcatcgtcctcgtgaatgagcgtcgcgccctttggcgtcggccggtcggcccgctgggggtcgtgggctgaaggcaacggcgagatgagcgacctcgaggcggacgcgcgagggctcgccggcgggacgaacggcctgtcgaccgccggcgggcgagaggagccggacggggtcgagacgtggtaggtcggctgcgagcgcgacatgggagcggacggggtgagggtttaggagggaagaaggaaacagaggcgtccgaggtggggcatcccatgtcgagtcggagggacgagttcgtccgcgcagccgtcggcagtcttgccgcagcaaatgacgccgggcatgaatctcctttggtcgatcaagccgtcatccgtcgagacgaggcccgttgaggtggtgaaggagagaagaggcccagctgctagttggccgtctcgatgcgcatctcctgtcctgttaccggccgggagagcgtgccaggagactgacctctctccctgcggcaacgtcgtcagccctcgagaaaggcggcgagcggctcaacccttgacctcgaccgaccgaccgacgactcttgcaccctcgcctggccgctgactctacttttcaaggttctcgagaatgcgcccctgggcatcagccgagcgagtaggagtgctgaccaggagcgcctgcccatgaagctccggcatcgagtcactcccttcctcccgtagccgccgagctgagccgactgccgacccgattgcctggcctcgagatgccctctcgacccccatctcctcccctgccactcgacggtcgaactgtccgccacctcctcctgcagccagaaggatgcatctcccagcagcggacgtcgagcgcgacctcagcacgatccacgactttatctcatcgcacccgctcgggctcctgacgacggccctcccgcacggctcgctgccaaccctccaggtctcacacatcccctgggtgcttgacccgccgagcgcctcggcgccaaagggcgtccttcgcggccacatcgcccgccagaatccgcaggccaaggcgctgatggacacgctcggcgaggcggacgacaagctcgaggccgaggtcctcgtcctcttccaggcgcccgtgacgggctacgtcacgcccaagttctacgtagagaccaagccggcgacgcagaaggtcgtgcccacatacgactacgcggcctgccaggtctatggcaaggctcgcgtctaccaccgacgggacgacgctgcccgcgggcccttcctcgctcggcagctcgacgacctctctcgcgagcaggagctcgcagccgggcacggcgagcggccgtgggaggtcaccgacgcgcccgagccttacatcgagattctcaagaaggcgatcatcggcatcgagattacgctcgaccggctcgagggccgctggaagctgagcggcgacaagcggccgggcgaccttcagggcgtcgtcgacggctttcgggcgagagggacgccagagggcgagaagatggcagagatgatcgaggagcggcggaagacgatggcagagcgggccaagggctgaaacgtgatgcgtctgcttggccgtcttgcgaccctttgcgccgctacactcgcaccggctcgcgctgctaaccccaggcctctcggactcgtctgcgcgacgcgtcgcattatacaaaagccggacaacatgcgagctggtgctgcaagaggagtgagagacgaccgccggcccacccttcagacgatgtactcgagcgcgctcggtatcaggacgccgtcagccttgcggacgagcgagagcagccggtcacgcttgctgccggtgtccgacagcgagtcgcccaacggctgcgggctgaggatcgcggcaggctggcgagagaggcggactggcgtcaggcttctgctccaagaaagactcgaccgggagctgcggcaataacgtacgaggacggcggccatcacttcctgacagcgcagctcgacatgaggggcgcggcggtggcctgccgtgcggcgcaagcaaaagtctcagccagaggtctcactgagacccgcagcgagaaagaggacttgccaaagaagagctcccaggacgagtcactggtgctggcgtttttgcggaaggccgtgccgctaaagcgcaggagagaccaaggtcagcacacgtggattgtcgacgagcgacgaccgccgtccgactcactacagcgtgatcatcttgcgagtcgtccgcgagaggaaggtcgtgtcgtaacccttgatgttgaccgactcctcgttctggccgagcgactttggctgcaggtagcggagcaatgacgggaggggtgtgacggggcaggcgatggcaccaaggtgaagggcagggccagagagcgacgcaggctgcagctccttcagccgagggatgacgaaggtgtagcgcacctgcaaggcagggccacaaaggggacgatcagcctgagatgcgtgtcttcgcggtcgactcgcacgcacgctctcgacgccgataatcgtccaaaccgcgttctcctttacgtcgatccaccagcgaggcgggtggtcgagcatgggctggtctggggccttgggcttggccgggcccatttcagacgaggctgagccgcgacggccgcgggcagaccctacggacgacgagcgcgagagcttgccgctcttggatgcggacgtccgtcgcttcagcaccttgccgccgtcgttgctcgtgtcggcttcgaggtcgagcgcagacactgcaacgtctggcgcgctgtcggctgccggtggagctgccgggaccgccatgtctatgtcggcttgcggaaacagctggcggttgtcggagggaaactcggttcggatgtcgtcatcagcgatgctgaagaagccgccggtcctgccggccgagtctgacgcaatcggcatatacgagtggttgtagacctcgaaggcgacctgccggtcagagggaggagggtcagcgagggacggcagagctcaactgacgcgcctgagcggaccttctggagctggctaatggcctcgccgatgccttctccgggcggcaggctcgggtgattctcctcgatgcgcgaaaggtgaccgccgagggcgcgactcttctcgtcgacgcggcggacgacgaggatcggcgagatgaagccagtctttgggcactggagaacgaccgcgtggttgaagtggctgtgtgaaggggagggctagaggtcagccttggcctgcaacagagtcgtagcagggggctggaaccacattggctccgggatggcagggttgcacgacattgccatcggcggcggagccggccagtcgggttctggcggcgaagcggtgttctgctcgtgcttccgggagttgatgtcgaccttccaaatgataaaggcgccccagtcactcgtgctggcctggaacttggccggcgtataggtcgggcctgacgcccgcagccggcgtgcctcgtccgagatcagcgaagcgccgtcagaggaccgaagggaggacgccgagtcaaagatcgagaggaacttggtcgacgccgcctgcgacttgtgccgctggaaagccgagatgagtgtgccgtgattgatcgaaactggtggcgcaagacgaggcacagtcggcaaatagtgagcccctatctcgcctccacgagctcaggccgcagcgactcacggtcgacgcccttcgcggccgaggccgtgttgctgccgctgaccttcttgcgcgcgggcttggagatgaccttgatctcgcggctctcaaagttgccaatctcgagcccgctctcctggcccggcagagcaggcgcctggacacggacacaggccttgacgacgcgctttgctgcgcccggcaatttgcccgatatatgcgggctggtgtgcagcgctgttgatgcctggtcggcgtcgagtgcaacaccctcggtgatgtagacgctccggttgacggccgtgccgtaggcggcgacgtcggccacatcgaaatgcgcagctgcggacgagctagacgcggccgttgccttgtccttggcacccttcgtagccttcttcttgccgggctcttcttgtgcgtggccagggtagtgcataggctggccggccgacgacatccagtaggtcgaagtcaacgcaggtgaaggcagcagctcgtgcgagatggcgatgttgacgctcggaggcgccgcggcaaaggtccgcccctgaaggccgtcggggaagaaagcggtgggcgagaccgggcctgtgctggtcgtctgatccggggctgggatcagcgggtcaaaccaccctttacctgccaagacagccaaagggggagggcagaggaagctggatgaagaggacatcagcagtcagatcatcaaaagaaagcacaagagtctcaccgcttctctttaccgtacgacttctgtgcgaccttgggcgtcatgacaatgagcgcgcgctcgccgagttcaaagcgctgcccgcgttcgaggacgcggtcaaccatcggcgcgaaccttgatcaggcgaggaatcaggtgagcagcaactcgaaaagaggtacgtaatgcgcgggcgtgcacgcacggtggcttgttgtggatgccaaattcaaagtcgtcccagcccgtcacgtcttgcgtctcgtcgccctctgcgacgcccatgaggctcatcgagacggcgacgtcgcgaccgccggttaggtgacttgggtcgctgcgcaggccgcgctggcttgacgcgtacggctggtagacggtcggctggcttggaggcgtggccgcgaccggcatgggcgaggcagcgtgtgggctggaatggaaggacaggaagggcggttgaggtgagagggagtggggcggttgcgggctcgcactgagcggcagggcgaaagggtgagcgcctgaggggaagcccgtcgggagcggcggtgacggctccgagttaggcgaaagcgacgacgtgtagccggccgaggacggtgacgccatcgggtagagcgacgacgggtaggccgcttgcccgaacgcctgatggatcccatccggctgctggatgacaggcgggctcggcagctgccgcccgtactgggcgggctgagggaggtcgccgccgaagctgggatactgcggctgcggagggttcgaatcggacggatgctgctgtcctgctgtcggtgctgtctcggcggatgcctgagcaaaggcggccatgatctcgttgaacgagagcggatgcagcggggtcgcgtcgttgagctgctgctcgtgcggacgcacgtagctcgagctcccgggctcgaagccgacctcgctgctggggccctggccaccatagcctggcgcgtacggctgcagcccgtggttgacgtggtgatcatgggccgctccaaaggtcgagtagctctcgtgagggtgctggaaagacgacaggtcagagggattcgggcactggtcgtgcgcgtgaggagccggcatagcctgaaggcggtcggcgtacgggagggagcaggtctcagcgtatgggtcgctgcgacctcgctgatagaaggcgactgacctggccgctgtaggcggcatgctgcaggtgctgctgactggcaggccactgatcttggccgtatccgatcggttgagggtacgagcccggccgggccggctggccgtccacgccgtacgcatagtcctcggactcgctcgcccagaacgaagcctgcatgggtggtcgattccagtgctgtcttgctggcagcaggtcggaagggagaaaggagagcgagaccagggtcgtcgtccgaggcaagcgtcgcagtcagcgggcccgccggccgccgacggcacgcagcagtagaccgcgcaggcctggcgggtgcccgacaagcccggacccttgcagtccctcttcagcatgacgcatgcagtaagagcagcaagctgagccctcagctccctgccttgagcttcgcctcgaccgagtcagcaagcgaaaggtcgaggacacgccagcagcagcagcagcagcagcagcatcaaggcgggatgacttcggacgcaggcccagggctccctttctgacctcgcgccgctcgctggcccgtccagccgtcgcatcgccttgtcctttacctcgcaacgcccaccctccccaactcgcagcaactcgctctttctctctttcgcaacctcgccttcctcttgcaacagactccgccctcttccgccttcccgccatgtcgtttggaacgccgcccgagtttgacccgctccgcgagcagaacatgctcgacaaggcctacctctgggccgagaaggtcagctcggcaatctcccatctcgctaaaggctggacgacgctgacaatccattggcttgcgcacccttgcagtggttcgagacgtcgccttatgcgccgtatgtgccgtacgcgctcggagcggtgaggccaccttgcgatggacgctttcttgatcccgccgtcgaaccgagactgacctcgcttccccttgtcccttgtccggcagctcgcaatggcaacacgattctggagtgggtctcggttttctgcctgctcgggcccggcatgcgatgcccacgaacagctgctgacctcgatgttcgctccatttgcagtgtcgcggcgcatgatgaactcgaccgtcaaggtgcatccgagccagcttgaccagaggctgaggcccagatgctgatgttcgaacctaccatcctgcagaagaatgaggccagcaagcaggctggtacggccacgggcacggcgccgactccagtcgccgctgcaccgaccgcatcgggttccggcaaaggaggagcggtgaagcgtcgcaagtaaggagacgttcgtcgcggcagcaggtgcgtcttcctcttactctgcggtcctgaggaccatagtcggattgaatgacaccaaagttgacgacgtgatcgtcctctcagcccgggtcagcgagcaggtcagaaggtgataggcacgttatggctgtcggctaaggtgatagtaaggaccagcgtcagtggggttcatcgagcgagagtcagcagggtcagcgtggacgtcactcgagtcggcgacgcaggccgcccgaccgccgttttgcgaaggaggggcgacacagcttgagcatcgtgatacaagggaagggcaactgcaagagatgcgcacaaggaaagtgcgatttttgagatgatggtgcaaagaaggtcgaacggtgcaaaggaggccaagatgagttagatgcgaagaggcgaggcacttagatgccggcccagaggccgaagagcgaggcggtcgggccgtcccagacgagtccacggctcgtgttctcggcccgggccggccaggcattgacgaggccgtcccagagctcgaggctgctggcctcggcgccgatcgaggacgagccgttggtcatggcgatgagaccggcgccgaccgactggtcgagccacgggtagctgcgggcggaagagggaggaggaagatctggtcaggccgctgcggaaagaatgggagggaaaagagggcgacgacgcacgcccgggtcgtgagcgcaaactcgtcgttggcgaagatctcgatgaccgagttgtcgacgatgacagtaaggttgagctggacagtcgtggcgccaacctggggccagagcttcagcttgccgagctcggtcgcgttgttgactgcgaggtgaagagggagggaggcaaaggggtcagtatccagaagagggagaaacagccgggcaggcaaacacgacgacgcacaggtcgggatgagcgacgacttctcgcggacgacggtgagctcctcggtcgcaaggttgtagtagatgtcggtgcactcatcctccgaggcgaggacacgaacgccgacgctcgcagtcgagttgcgctcaatgttgaacgaggcggcgacggcgtagtgccggccggtcggctgcgtctcgaacggcgtgtagccggcgacgacggtcgcgtcggctgggttcgacacctgcgagttggacttgtacgactcgagcgtctcggcaacgacgcgctggccaagcgtcgtgatggtcacaccctcgccgccgccggtcgagttgctgaccatccacgaggccttgtcgttgataccggccgtgttggggtcgacgttctcgaccgtcttgacaaagagcgaacggaacagggtgaaggcgcctgaggagggagaagaggtggtggtaaaggagcgtcagcgcactgcaacctactgacgcggctcgacaagaaacgcaccctggtaccccatctgagtagcgagcgcaaaattgtcgtcctcgtacgtccagcctaccatgacgctccgcgagtcgaccgggaacgagacaaaggcataggacgcgccccagtcggcgacgccggccattttggtcgtcgccacgatcgagccgttgttctcactgtagtccaccgccgcccaaagaggccagtgggcctggtgatcaggacgtccctgctcggtaccgaagccgataatgttgagggcggaggcgtcggagccgtcgtcgtaggcctcgccggtcgcgttgacgcgagtgacaaaggcggtctcgtagttgatgccgacgttgccggaccagtcggaccagctcgatcggatctcatcctcgaggaagggaccaaggtaggtccacttggtgacgtcgccctcctccgtctggcggtagagccagagctttgggccgacgtcgatgacgccgcccgagatagtcgcaaagtgcgagcccgaggcgccctggctggcgttgccgagcatcatcgacagctcgggcgacttgaagacgtaggggtcgcggaagccggtcaggttattggccggccagtcgtaaatgactgggttgacgccgtagtcgagcttgatccagctcgcgccgtcgtccgtcgtgtaagcgagcgactgagtctcgaccccctccttctctccggccgtcgcgccgagcgggccggttgggttggtcgacgtgtagaggatggtcgggttgccgtcgacgccctccttgataatcgagccgtcaaagacgccccggatgtcgtagatggttgaaggccagatcgtcttgtagtcctgcgggacgccgtcgacggtcggcccaaagtcggtccaggtcgtcatgtcggacgagtaggctgcgccctggctgatgttgccccacctgtgcgagcgaaaagagaaggacggtcagcgccgggaaggagagaaggcggcaggggccggccgtacatgatgtgctgtgggtgcgactgatagccggcgtggatcgagccgtcggcgcgctggtacatgctgcagagccgcaaggcacgaggtcagcgacggccaagcagcggcgagacgagcagaggcgctaaccccatcgggtcgttcatccatccctcgggggcgatgaagcgggccttaggccggaaggtcgtgaagagcgtcgcgttgccgcagagcgataggttgccgggcgccatcgactggtccatcatgcagccggcggccatggtcgagttgatgaggggcgtcatgccgccgcccatcgtcgagttcatctcgttgctgaagagggagatggcgggcatcttggggtgggaagcgaaggggttggggaagaagagctcgccgtccctccgagctctttaaaggaagcaagtcgtcagcggcatcggccgtcagcttgcggggaaggggaccgggttcaagccttcgtcgccgccggcagttggccctcggcggttgtacggccatggctgctctaggcgagaaagagcacccgagggaccgaggagtctcgatggaggttcgtttggtcgtcggcgcgggctgaggtcgggctgcctcgaggcgaagcccgtcctcggcgtgcccggccaaacggctttacaggcaggcaggccagctagagcgagaccttgaggattgaacgaatgagagaggaacccaacccgctctgccgaacagtccttttgctgcctgcccttgttaaggtctgagggagagcgggagctgggctgaagttcagcccatcggtcaagaccgctgcggcgctgctgcgccgaggcctcttgatctgcttccttcgcccgccccttcgccgttgttccagccctccccaagaggggggcgcgccgaggccctcctgtcgactcaagcgaaggttggtggctgctgcaagcgatcaagaagacaacgcaacgacacgacgcggggcctcgacttgccgccctcactgcaagcaagcaacgcagccgacccgccgtcggtctgtccctcctcgctgtcgttagccacctcggcgatcggcagcatgcttgcgtcgaaaacggcgtccttccgtcgtgcaaggcacacaaagagctcatcagtcggccgtctctttccggctgatcgcgatctttgagtgctcagcgctgacacatctttcgacgacgctcgaggcaacagtgtcttgatgattccgatcgtgcgacatatagcccttggcgcgtcaaccaagccgagccctctcagtgtgcgaggtcgacctggcggcgtaaagtcccggtccaccgcagcgcgcgaagccacatgccacaggagcccttggcgcaaacgagcagcgggcagtgccggttgagcagcggcccaaccgacacgggtacgcacattcactaagacgccgaatgagctatggccgcttcctgcatacttgtatggtcgaggacggctcgggcagggtgaagagcgaaggtctggcacaagggagcgtcgcagtcagagctttggagggcacaattacgaggagagatgttgagacggtcagcaagagcaggccgaacacgatgtcgcgggcgcgtggaagcgaagaatctacaagcacagccggtccctaagtgtccgacgtgcacgagcaagtggcgccggcgcaggtcccgacgggcgtcgtcgcgaggcacggcagtgtgtaggtccagccggatcaaggagtctttgggaggctcaccagccgggctgcaatcgtgcgcggctgatgaagcgaatggcgactgaccgtaggctccaaccccaagcgcgtcactgctccttctgctcgtgaggaaggtgcaccgtcgtcgcccggtcgcagacagacgccgatgcgcatgcgtgctaattccgatccgtggacgcagtgcagcgccgacagagccttattgtcgtccctttgacgaccagcaccgactcgtgacgaggagtcggacgtcagagagcaagagagcacgagagcgagcatcgtcggccgcgcgttggtcttgagcgcgagtgcagggccagccaggaggcgcaaccttgtccacaagagctcgacaggcagtaacgaccgtcagcgcgacaagctcgtcggtaggtcagagcgagtgtcagcggtcggtggtcgtcgagagtcaacggtcgctcgaccggccaacgtcatcctgcctcggccagacgccgcaccgctcgcgccgccggccggctcttccatccttccttcctccatcacctcgcctctacaaacgcaagaccatcctccacgtctcatcatgtcgctcgaccctcacttgtttgtccctcccgtcgctcttcagtgccgccctcgcgctgccctggtccagtcgacaacgccaggcaccgggtcgcgcgagcgagacgagatgggcgaagcgcgtcgagactgacgcatctcgctcgccctgatagcctctgggccgcaggccatgccatcacgctcgtcacggccgccaaggtcgcgctcaacaccgtcatgttcaagggcaccggcgctcttgcctacaagggtcagtcgctcgaggcgcgaggcaaagacagcaagcagcagggacgggtctcaaatctgtccctcctcttgcccttgaccgccggccgccatggtcgacgatgcgagctcgaggctgatccgagtctgccctctgaactttgcagccgcctactcgggcgcgctcatctcgtacggcattgtctgcctgtgagtgccgtcgttcgctgtcgctcagcccccgccgcgcgctccgggtcgtcacccctctctcgcttcgcgccaggtctgacgcctacaccttttcaccttcgtttctctagcaaatcgatcggcctcccgcaatcgcacacgcagggcggcctcatcggctacctccagaaggcgctgatggacgagaacgtccagtatgccgttctcagcctctactggtggatctccaagccgatcgcctgtccgtcctttcgcctgcggtcgctggagcccgacacccagactgacgtgactctctctcccaattgcacaccagtgacgctcctgccgttcgccaccttttcgctcttccacgtcctcaccttcctccggaccaacattctgcccaagtttgcgccgccggcggccaagccggccgcctcgtctggcagccaggcgacgcctgcggccgcaaaggcgcagacggcgaccgacaagctcggccgggccgtccagctctgggtcaagggtccgtcgcccagtcgtagtcatgctgcggccgccatcaagggttgtcggacgctgaccctcctttccgactgacaggcaactatgaccctgcgatgaagtttgtcgcctacaccgagatcctcatctttgcgcgcgtcctcctcggagccgtcacgtgagtctctcaagcctacgctcttcctacaaagcgctggcggacgctgacatccagccttcatcctcgactaaccgccacagcttccagaactcgcttcttgccccgctcttctacgcccacttcctccgcctgcgctactaccactcggccttcacccgccaggccgtcgacggcgtcatcgcccggctcgacgggctcgtcgccggccagtcgccggccgtcaagaacgcctacgggaccgcgaagggcgtcgtccgtaagtgggccggcagcgtcctcaccaagaaggaggacggcccggcaccggctgctgctgctgctgccggtcggcgctagagtgcgcgcatctgctctgctcgtcgtcgacttttcgctggagtaagtgagagactttggagggcgcatgctcgcatctcgacgcaggatggggaggacctgtcgataatctggagggcggcaaggaggcgtcgatgtcatgcgccgccagctttgattctcactcagcacttcgtacaaggcgtttgctgccgcatccgagtcgaccgctgtcagaggggctcttcaagatcgcactcttcctgccgctttctcctgcacccagtccctctactgtcaaccgtcggccggcgctgccggtgccggcgtccttgacccgccaacgcccagcgcccggaggccaaacgaggccatgctccccagtcgcggccgaggcggctctgcttcgcttagcggcggactcgggtgggtgctcccgctgcccgacgacgacgacgacgacgagaaaggagcaagggagagcgtccgattctgcgcgcgcggcgagccggtcggcgtcgtctgatccgagggcgccagcgacgagaaggtcgggcggccgggcgagaggaacgacgacgtgctggctgcgggcgaggccggcgtcgaagccatcgcggctgccgggcccgacgtcgcctccttcatcaggaactcgacaaaaagctgcgagaaggactggcgaggcgggagcagaacgtcgtcagcggagagggaagggcaaagccagtgtcgggtgatgcacctcgttggctgccggctcctcctcgtcctctgcgatcggccttgctacaatgccgcttggccgtcggagcatgctgcccgccctcgcgctcgacttttgtaggccggcctgctcgcgctcgaggtccgaccacgagagaattgacgataggagcgagagcatctcgaaccgcttcgagtcgccccgggccgtcgtcaggtatgagagcaggatgtttgtgacaagccggctgccaccgaagcgcgcccggcagtgtcagtagtcggcgcacctgccgagatcgccgagagaggagggcacgtaccggtcgacgttctcgtcgcccgagttcttcttgatgcgtcgcagcgcctcagtaagatgttcgttcatgatgacgtctggcggagaggtggaaaggggtcgtcagcgctcccggtcgttgaagagaatgacagtgtgtcgtgaacgcactctcgtgccggatcttgccgattattaagttcttctcttttacctcgcgctcgagcgtctgggtcttgccagcgtcggttttcagctcgctgagccgggcctacagggggtgagacagccggtcagcctaggcgaatagagccacagaaaggtatgtcgcgtacctcggacgtcgatgcgcgaagcttccactcgccgagcgaggccgatgagtttcgcaactgcgtctcaagctccgagacggccgaccgaacctccgactcttttgctgcaggttaggaggatgtgacggcagaggcggttggtcagtctccgacagagagccggtgggtgatctcgcgggaccgcacatgcttggaactcctctaacacgctctggaggttgacggcgcgctcctcctcacgcttcgccctctcgcgctccttgtcggcctcggtgatcagccggcgcacctcgccttctagctcgcgcactcggagctcctcgtcctccgcccgcgcacgctcgttcccagcgagctcctcccactcctcgcgctccatccggagccgctcaacctcgccctgaagctcacggacctcgcgctcgcgtgcgagcgcagagtcggacgtcgtcgacgactggaggcggagcgccgagaggtcctgtgacagcgacgaggtttcggccgcttgcgaggtgagctcctgctggagagttgtgaccgtcgactcgagcgacgaaacctcagacatcaagcccgtgatctgggcctctcggcggtcgagctcctcctggcgagagcgaaggcagggcggtagagattagcttctcgagtgtttttatgcgatcggaccgccttcaacaacgtaccgcgtcctcctggagcttcttgccgagcgtctcgcgcatgccgccgaccttgccgacgaggctcttatattgcgcctcgagccgttccttctcggccttggtcttgtcgagcgccttgcgcagcacccggagctgctcaccatcggcgcccgcgtcgtcgcgcgagccaaggtcgactgacgacggccgggcagtgtcgagcgacggtcggggtgagggcgaggcagtgtcgaggatgggagggagcgagtcgagtgtcgagacgaccgacgcctgggcggcatgcgatggtgcgacgggcagggcggcggccggaaccagagctggtgacggcgatacaagctcctcaacgacgataggaggagcagccgaggcctccggcagtgatcttggtgcctcctcaggcggcgatgacatgtcgacggcggctgagctgggctgagagggaagaggagcgggctcgtcgacctcttcctgagccgtcgttgtcgatgccggctcgacctccttcggctgattctcttccgtcgccggcgtcggcggctcaggactcgtcggccggctctcctcatcctcgtcctgtccatcatcgtcaccgccggcgacactcacggccgggcttggagcggcgctactgagcggcgcgctcgtcgccccgttcgtgctgccggctgtcgagccggtgccagaggccgctgtcgccgccgctgctttggccgccgacttggacttcttcttggccatgggaggctgtgctgactacaaggtgagaggagatagaaaggcggccttgattgagggcgagggggcaagagatgctgccagacgagctgatggtcggcggcgagcgacagaccacgcgagcgcgccctctcgaccgcgggcggtttcagccctcaggcacgcatgccaactcgccttcgactcgtcggctctagactcaagggcaggccaagtgctcgagcgacgtatctgctcccatcaagcgtgccgctcaagctcggtcgatgctgccaaaatagcaaggagaaacgccggccgtcgtcccgcgcccacgtatattcgacagtcatacatccggccctctcgggaaacggtttcgattcgagcagtgaagggcaagagggaacagaaagacagtgtcgcaaagagtggtgtgtgggtggctgaggtggagtctgacatcgaccctcgcggtcgggccagcggaaggcttgcggccaggcaagaaacggcgggcgctttacgccttgatgaagtcccggacgccctcaagccacgacatgtattcctacaagtgcaaacgtcgaaaaagtcagcaaggagacctatctctcgcatataagggggagcaacagggccgcaccttgacctccttgccgcgctggagctcgacaacagcgtcggcgagcgactcgtcaaagccgcgggcctcgatgaactgctggaactgctcctgaacggtcgggtcgaggtggtcgaaggctggcacgagcagggagtggccatagagcgtcagcacaaaaccgatgggaaccgtcgaaagcagggagggcttaccggggccgtcgtagagctcgccgcgcttctcggcgccctgcgtcgtcttgtcctcagcgagcttgccgtccttgtaatacatgacgtccgaaatggtaaactgcgagtcctcgatgatggtgtcgacgacgagggccgagccgtcggtcgacttggtgatggtgagcgtgacgggcaggtacgacgtgctctcatcctgctcggacgcctcgtcctcctcctccatctccatctcggccgcgctctcggacgtctcgacacccgaggtcgagaacgaaacggtgatgctgcgtcggggcggcggtggtggcggtggcattagcagaagcgcagcgggtgagcctcggcgagcattgaaagctcaatcgcaaggcagacttacgtctcattgtcgagcttcttggtcaggacaacctcgtcctggccggccgactcggcgatctgtcgaggtcgaaagcaaggtgggaggtgcaacgtgtcagcctgcggctccgatcccagcctgcgtccaaccctcagccgcatcaagagggcgcgacgcacctgaaagccgagctcctcaatcttggcccgggtttcagccagctgctcaaacgtcttcttgtccttggcgtcgtccgtctcatacttgaactcctcctcgaggctggtgacgaggtcggcgtcgcctggggggccgccgcaagggaccagaagaacgggtcagccaacaagggtagacggcctcagaccagccaacatcctccggcaagcgtacgcgcaggactcactctcgacagccttgaagcgcgaggccgaaagggcaaatgaccggctgctgcagacggcggcggaccgggcggccggggcggcgaagcgggcgacggggccggcacgaatgaccgggcggagggcggcgcggaagagaggaagcgaacgggaggccatcgtgaaggtcttaaagagaaaaaaggtcggaggtcggtgctaaaggggtgatggaggatggcggttcagggaggagggcaggcgacgaggcggaaggccgcccgcgagttttctgccgcgcagcacctgccagaagctgcacgatggcccgacaggacagggcagaggctaggatgctccctgtcgtcgccttcctcaaccttggggcagcgaagggcgggatgagccgacagaaaagctagccaagacattgcatcgattcggtagatcggctcaaagcgccaccctttagcccctgcgccagccgccggcttgcggccgaccggccccgtatggcggcggcggctgctgctgctgctggcgctggtgcggtccgccgtagtgctgctgctgctgctgctgctgctggtagtgcgccggaggcggcgcctggtgcggaggcgcttcgtaccggtagccaccaggtgcggcgggaccgggcgctagagacgacggacgagcaagagagcagaagtcgtgatcagcctcgctgaagcgcaggactgcagcaagaggggcgccatctggcagaaagtaagagaagagacacgcactgagcggcggaggagggaccgtcggcggcggtgcggcgatcggtgcgatccggctcgtgacgatggccgccatgacatcgtcgacggggaagttgggccctgggtagggcagcgtgccagaggagtcgcgatgtcagcaaaggatgtcactcgaaatagccggcaagcggggaaaggagaagcgcccgacgcaccgtcaaacatgcctgctggcggcaggaggccgacaaaccagccgagcgtcgcattctggctcggactcggcttgttctcgggtagcttgtggagcatcgggctctgctcgcgcttgacagcagcaggcgcagggcctgccgacgccgccgtcgtcgcgggcgaatcagcccgatggcgtttcgatagcggctcgttgcgcatcgacatgcgctcgcctgaagcgccttgtgggccggctccacccgtccggtcgactgacggatgccggccagagcggtcgtcctcgagcggccgcttcgcaggtgacgcgccgggcgaagcaccaccggctccggtcgcagagccagcgctgacggcagccgttgtcgcgggcgcaagcgtcgcgaggggcgtcgctgcgcccgaaacagcggcgacaaccggcgcgggcgcgcgagcggggacgacgaccggggctgatgcgaccgccaccggcggcgccgcctgagcatagaccggaacactgctgccgttcggcccgccagggacgagcgtcgatctcgggccggtcgggatcgctcgaggacccgttgggacaccggccatcgtcgtcggctgctgctgctgcggctgggcgacggccgcctgccgggcgccaaagccgaggtcgacacgcgcgatttcgtcgatcccggtgtacgagtgcctgcgggcgaggtgcttcgttgccgagtctgcgaagaagaattgcgccattgaccaggtcagcggtcgtgcacgcgtcctagaaaaggcaaggacggacctttcgggaaggcctcgacgaagcgcgcgtcgagcctctgggcgctcgcaaggtcgccaaagaggtactcgtaccgcgcccagcgctcccagagaccgcggctctcctccggctcgaactttgtgacgctccgctcgaataggacccgggcgtctgacacgaaggggcacttattgtcagtaacgcccgagcgaagggcagcagaggcagccacgcactctggtcgtcgttgatcataatgaggaacgcaagatagcggtcgacaaactcgagccggtcgccgaataccttaaggccgagctcgaagatccgcgtcgcaacggccgggtctttgctgcagtggtactcgatcagggctagagaggtgtgagatgggagtcaatggccggctaggcaaacgccgagcaggtagcgcagggcgactcacctgacgcctcgaagacctgccaggttgcgtgcggaaacttgcgggccttggcaaagacggaccggccgcccttgataccctgtgcaagcacagacggtggtcagccaaggcgagacgaatcatcacccgctgggggcagggaccgagggcaggacgcacctctgaccgcctcgcaaagcgcatctgcatgatccagacgaggcccgcgcccttctccttgtcgtcgaccgccttctgctggcgcccacggacctcgcgctctttcgcctgacgctcgcgctcctgcccgcggaggacctcggcaatgtcgatcatctctggctcgccgccttggtttcctcctccaaccgtgcccgtcccgacgccgccgcctgaccggctcgccgcccctgccgcctgagcagcgtacgacgcattaagcgccgcgagcgagtcgaagacctctttgtcgattgaccgcttgagcgccgtcaagtcggccgagagggcgtcgatcagcttcgagaaggcctcgtgagcggccgcaaagttcttccggccctcttcgagctcggcgagggcgaacgtcaggaggaagctgggggcgaagccgacgtcagccaccatctgcaacgatcagagcgagatgcaaagacagagcgttcgcacctcatcgggttagcctcgagcccggcctggaggaaaccagcggcctcatcgagccgctcctccttcatctccgcctcggccgccaagtgccacagctccggatagaatctcccctcgcccgcgacacacttcctgagcgcatacgcaacgcgccttccaagctcgggcaggtcctcgccctcgaaaccgagcgggttcgtccgttcccaggcgagatagtcgcgccagcgccggaccacggcctggtcggcctcggaccagagtgccgggcgggacgggacgggcgaggggatgatcgtcgctgagggcgggagccgggcacggagctccttgaggaccgcgcgcgaggtcatgtatgccggcgagcgctcggcgaggaacttcttagcctgcgaagcagtcagagtcaaggcaggtgatcagcatgcgttccttcggcccgcgccagcaagagcgtgatgaactcacagtgaccctattgacctggccttcaaactggtcgtactcgcgccagacgtcctcgaccccttcaaacggtaccttgaccgccctcccggcgagcgccctgtaatccccaactttcgtctgctcctcccactgcgagcgtgtctctccctcgcggacaaacgcaaggtactccttccagatcggaccagagagcaggtcgagcccgacgtgcaagagggcaaactcgtacgcttggctgattgagagccgagcgccgaggtaggaggacggaagggtcgaggccgagggagggatcggcgggagcgggttctgacgccggatgtagtgcagataggcggctggccgatggcgggagagaggacaagagtgagcccgcgtagactttactttcgacaggagccgccttgcacgcactccaaagcggcgggtacccgagcgggaagcacggtccgcccccgcccttccctctctccctcgaaaacgcccgctcaaacagcctttcgacctcctgcagatggtcgtgcgcgagctcgagctcgacatagagcaggtactgagcgccggccgtcgggtgccggctgaggaagagctcgagccaggcgcgggcgtcggcgagctcggagtggtcgatcgacgactggatgagcgagaggagtggggcggagtcgatcgggtctggtgacgggacgagggtggagacgagggtccgtcagtcttccgctcaccgtgtaaagaagtggcccactcgacgaagggcgaaggagcaacgcactcgcccgccaagccgcaacggccccaacttcgcgcttgacgctcgggctcgcctcggtcagaccctcagccatcgacaagcgctcagaagccggctgctccttgccagcgccctcagcaacggttaaagccgcagctgaagtcgcttcgcgatcgatggcgcttgtaggaggtaggccagcaggcgtcggcgtcgcgttgttcgaggaggtctcggcctcgcctggagcagtgacaccgtccgcgcctgctgctgacgttggtgctgatgccggcgctggtggcgaggatgaagaagactctggctctggcgcggcagatggtgccagggccgaggacgacgacgacgacgacgcagcttgctcgccagcggcgacagtgccggtggtcgacccttccgctgctcctgctgatcctgaaggtgtcgccgccgaggttccagccgcagaagctgagctctcgctagaagcaacgacatcagagtgtgcagcaacgtcggtctcgctgggtccgtcctcggtcgtctgctcggcggctgcgggcgtcggtgtcgcactcaaagacgaggatactgccggcgccggtagtccatcgacagccggcgccgtcgtcggcgtgctctcggtcggctgaccggcgtcggccatctgcgtgtcgtccatttcgggtcagtcgttcgtcgtcgttgatggctcaagcaggctcgcccagccggagctgcctggctgcgttggccgacctaacctaaccctctgtccgtgcatctgcatcgctcgtggagaccccgcccttgccgccgcccaatctctcgtcgacacctccgacttcttcagccccaacgaccaccaacacctgctctaccccccgccttttctactcttacaactcgcacaccatgtctgctcccgccgccaagggctccaagggccgcgtcctgcttgcctactccggaggcctcggttcgtccttctcacttcactctttttctcgccctcgctcggccgtttccgaccgaactgactcgtcgaaccgccctctgccgcctttccttttgcctgccttgcttcgcttgcctgtagacacgtcgtgcatcctcgcctggctcatcgacgagggctacactgtcgtctgctacatggccgacgtcggccaggacgaggtcggtttcaatttctcttcttatgccagccgtcggtgccgcccgcccgtttcttttcggctcgcgacgacgcgcgcggagagccgtcgaccgcactacgcccgtcgcttgccgctcatgttttcacatcgttttccttcaagggcgagcttcgtgcggctctgtgagggcgcgcggcgtgaaggcgcttgactaccggattcgaggcgggcgagcgctggggaagaaaaagggagcgacgggcgctcgtccggaagctagtcccccttcgcgcggcaaagcgactgacctccccttcttatcgcgggcctatgcaggactttgagatcgcacgcaagaagtcgctcgcgtgcggcgccgaaaagtacatcctggccgacctccgcaaggagttcgtcgaggagctcatctaccctgccgtccaggccaactgcatctacgagggcgtctacctgctcgggacctcgctcgcccggcccgtcatcgcccgtggcatgatggaggttgccgagcaggagaagtgtgatttcgtctcgcacggctgcaccggaaagggcaacgaccaggtccggttcgagctcgccttctacggcctcaagcctgacatcaaggtcatcgcgccgtggcggatgcccgtcttctatgaccggttccctggtcggtcggccctcctcgcctacgcggccgagaagggcatccccgtcgtccagacggcggctaagccgtggtcgaccggtgcgtcgcccgtctttttctatctggccaatccttgcctgtcgctaacgcccgcccttcccctccttcatagacgagaacctcttccacatttcgtacgaggccggcatccttgaggaccccaacacgaccccgccgcgcgacatgtggaagctgacgacgaacccggaggacgcgcccgaggtgcccgagcggctcgagatcacctgggtcaagggcctgccgaccaaggtcgtcgtcctcggccccgacgcaaagacggtcgaggacccggtcgagatcttcctgacgctgaacgccctcgcccgcaagcacggcgtcggccggatcgacattgtcgagaaccgctttatcggcgtcaagtcgcgcggctgctacgagtcgcctggagcgacgatcctccgcgtcgcccacatggaccttgagggcctgacgctcgaccgcaacgtccgcgcgctccgcgaccagttcgtcactgtccagctctcaaacatcctctacaacggctacttcttctcgcccgagcgcgagtttgtcatgtctgcgatcccggccagccagcggaccgtcaacggcacgacccggctcgccctctacaagggaaacacgattgttgagggccgctactcggacaccgagaagctctacgaccaggagctcgcctcgatggacgacgtcagcttccctcctcccttcctttctcgctggccgtcagctgacatgccctgctctcacagatcggagacttcaagcccgaggcgacgaccggctttgttgagatcgagtcgatccggctcaaggcgtgggcaaagatgaacgcgattcgtggccaggccgccgtcggcgtcagcgaggcctacaagctcaagcagtaaagactggcaatggggtccacccgtttaccactctttctctctctctctttttgaggacgttgtagaaacgagaacatcgcgcgtgtgtaggacatcccaaaacggagggtcggcgatatcaaaaggcccctcatattctctctctcatagatcgaccgactgccagccgcccgctgtgccctgcccttcttgcacgcgcgaacgctctgcagcccggatcgtctggcggcgaacgacgcgagccgctagctccgtgcgcgatgaccgcctctcatcctgctcctcatctcccacgcccagcatcgcacatacggccgagagacgccgacccttctttcctgcctcctctaaagaaagatgggcgccgtacagggctgccgccagatcatgagcgcgtcgaaacaactgaccggctcggagactgctggctgctgctgcgcacgactcgccctgctgccgtccctccggcccgaccaacgccttgcactcctcgtccatcctcgtctgaccatctcgccctaccccatccgcatccagcatcaagccatggacccagatggactccctcggcgctttgccgagcctccgacgacggcgcagagcggcctgcgctcggccttcgacgtcgacgacaacggcggcgccgagggcagaccgacggggctgcctccacctcgccggcgcggtcgcggaggtgggctgtctttgtcggcagcgacaccagggctcggtagcaggtcggctttcggcttgtcttctgcaggcagtagtaatggccactttcgcccggccgctgtcgacgctgggagcagctccggtagcggaagcacgaccgaggacgacgctgtccgagcgaccgacggcgacgcctcgctctcgcgcctgtctgtcctgtttcctacgctcttctgctatcctttccggctgaccgagcgttcgcacctgacccctgcttacacgtgctagctcggccgtccaacagcgctacctcctcgacccctttgccgagctctttgtccgcccgccgagcccgctcgcccctcgcctgtcgcacctccggccgccgctcatcaacctcggcacgcacgcaaggacatgggcgattgacacgctcatcggccgcttcctgacggaggtcgtgcagaagggcgaacgggggcagattgttagtctcggggccgggagcgactcgcggttctggcgcttgcaggtgcgtcccttctctggccctttgagagcgggtcgatcagtcgacgtatttagagctcgcccgcagtcctcgcatcgccggtctgactcttaagggccttccctcgccaccgcgaacatactcgcaggccgacgaccgcctccgccccaagcttgggtcctacatcgagctcgacttccccgaaatgacgcgccagaaggtcggcctggttgaccggtcacaggcgctttctgcgccgctcgaagagtactacctcggtgcgtttgagagagccggttcgagacgctgagccggaggcgtcgttgcgcagcacgagcgtagacgtgctgacactttcctttcccgtccctcatcgacctgacctctcgcacgaccgctctatcgcgcccgctcacagacgccgacaacactcgcctcgactctgcagtctaccacctcctcccgctcgacctccgctcctcctgctccgccctcacctccgccctctcctcgctcccgtcgctcgaccgcgcccagccgaccctctggctcgcagagtgcctgcttgtgtatctcccgccggacgtcgcgggcggggtcgtcaaggagctcgagggctggtcgggaggcgagggctggtcgggaggggtcgtgtacgagatgtttgggttcgagtgcgttctcgacggccggccagtcgagactggaggagagggctgacgctacttgctgctcctccaacctgccacggcagcgacccatttggcaagcgcatgttccagaaccttacggtcagtctccctcttctcccaggcaggcttgtccacctaccaagccggactcacccctctcgtccctctacctgtcgtcttcaggcccgcaacatccccctcccctcgtcccactcgttcccaacgctcgaaagccagaagaaccgcttcctccaagccggctacgcccacgcccgtgcgcgctcgatcaatgcgatccgcgccgaggacctgccgagagccgaggctgaacggtccgtcctccgtccttgctttctactttcagacacaagcaggctgacgccatcctcttctcgtgcgcctgaacagggtgcgcaagcttgagctccttgacgaggttgaagagatggaactcctctttgaccactatgcggtctcgtggggctggcgtccgagtcgcgccaagccggaccagggcaagggctggggtcttgcgccatagggatgatgttgagagcaggcgaggtgggacgttgacagggagtagaatggaggctacgcagcacgccatgcaggcggtcggtcctctatcctcctcgcttcttcttgtttcttcaagtcggcctgaaaggtcggtgcgctcaatgagaagcctcttgctgctcgagctgtcgtcctcgtgcgagcgcgagaacgagggcgggtcgctcagccagccagccagccctgtcgagtcgagtcagggccagccttacgcgcgtcagcgagtctccgacgtcgtcggccgacgactttcgcttttccagccttcagccctgcctggcccggtcaccttcacctcccctccgcctccccatcttcctcaacaccacaccacacgatgtctgcctgtgctcatgatgccgacccgtcctcgggccccgtctccaaggacgacatggtcgcgatcgacttgaccgagacggtccacaccgaggttgtcgagccgcccaagaaggagaatggcgtcaagaagagcaacggcgcgccgcatgccgtgagttgcccatgtccacgtcgaggacgctcgcatgctcgagagcgttcaggatggctgttagcacgagttccttgctatcctgcaaccagcgacggcgaggacgaagcagaggacgaggacgctgattcgtgcgcctctcctctccctcccgcctctgccgccacccccagggctctatcaccacccagacgccgtacggcccgcacccggccgacttcctctccaacgtccgcaacttcaagattatcgagtcgacgctccgcgagggcgagcagtttgccaacgccttcttcaacctcgaggttggtctctcgtcacccctccgactcgtcaagcagggcttggcgccgttgccgctcctccgatactgacgaagcgcaacacttctccgcccgtacctctcctctcctcctcctggctctctagaccaagatgaagattgctcaggcgctcgacgactttggcgtcgagtacatcgagctcacgtcgcctgcggcctcgcccgagagccgggccgactgcgaggccatctgcaagatgggcctgaagaactccaagtgcgtttgtgctcctctcacccgcttcgttgtgcggctcgggttctgtcgcttggtcgtgggttactgggctgctgctgggtgggtaatcggctcggggcggcaggctcgaggtctagttgaaggtgacctccggagtcgcagctttgtccgttcgacgccagggtgcgagaagaggccggctaggcgggcaagcggccgaagctcgccagctggccgtcgtgctggcgctcgaggcgtcgcgctgggcttgtcttccgaggaatgaggccgggctactttaccccgtttcatgacttgacattcgaagcatgaagaggaccttgccgcatccagaggctgacgcgttctcccgcttactctaggattctgacgcacatccgctgccacatggacgatgctcgcatcgccgtcgagaccggtgcgccctgctttcgtctcttcctcgcgcctgcaacccaggatgctgacgaatcgtcctttctctcccttgccgtcaggtgtcgacggtgttgacgtcgtcattggcacgtcgtcgttcctccgcgagttctcgcacggcaaggacatggcctacattgagaagacggcgctcgagggtatgtcaagctcgccctttcaggctttccgcttcgtcgctgacttgccttgctcgctatagtcatccagtacgtcaagtcgaagggcatcgaggtccgcttctcatccgaggactctttccggtccgacctcgtcgacctcctccacctttaccgggccgtcgacaagattggcgtcaaccgggttggcgtcgccgacacggtcggctgcgccaacccgcgccaggtctacgagctcgtccggacgctccggggcgtcgtctcgtgcgacattgagacgcacttccacaacgacacgggctgcgcgatcgccaatgcctacacggcactcgaggccggcgcgacccacatcgacacgtcggtcctcggcatcggcgagcgcaatggcatcacctcgctcggcgggctcgtcgcccggatgtacacggccgacccggaaggcgtcaaggccaagtacaacctgcccatgctccgagagatcgagaacctcgtcgccgaggcagtcgagatccaggtgccattcaacaactacatcaccggctggtgcgcctttacgcacaaggctggcatccacgccaaggcgatcctcaacaacccctcgacttacgagattctcaacccggaggactttggtatgacgcgctacgtttcaatcggccaccgcctgacgggctggaacgcagtcaagtcgcgagttgagcagctcaagcttgagatgacggacgagcagatcaaggacgcgaccaataagatcaaggagctcgccgacgtcaagacgcagacgatggaggacgttgacgtcatccttcgcgtctaccacaaggccgtcatcgccggcgtgctcgaggtcggcgacggcgacaagctcgacgagctgctcgacgctcaccggtgcgtcttacttcgcgactgctttcccccgctcccagctgaccccccctcttacgacccatagtgagggcgagtcgcttgaggagccggcggccaagcgcgtcaagaccgcttaaagctctgcacccactcataaaaggaagccgcgctcccgggcgacctcccatgccaccccttcgcttttctcctccgctgcatcgcgcggaaagagagtgagggctctccctattgtttctaaacgctccccttcccgtcgccattcgcagcatcctctctctctctccgttttacttctagatgtacgcctaggcatcgcttagaggtgcgagtctatggggtcagggtcaagggctgagtcgcgagggtcgccgggtcgctttcatcaacgagaggctggccggattcggatctcgtcatcgaccgcgattacattagatccagctgctggattgtaaagatccagagctgatctttttgatccagaagcctatccttagtgcgtgtaaacgaccggggttggcgcaaacgatggaggttggcgcaaacgagacccgtccgcgcagacgacggaaggggccgctcgcaggcggccatcattcccccttgactcaatcttcgcacgagatcgtctctgttgggtcgtctcatggatcacacgcgcctcgcgaggggtcacacctagttcatcttcttgatgagcgtgttaatggcgtcctcacggaggccctggtcgccgccctcaacgtagccctggaacttgcgctggcgccagccgccggtcgggttcgacagcttgaacggccagaggaagttgacggcggccttgaagttggggccgacggtcgcaatctcgtggacgaggtcctcgatgcagatgaggcccttggggccgagcttctgctcgacctccttgccctgccagcgagtcagccttgcgcctgcgaccagtgcatccttaactcggtctctctatcttgagcgtcgtcggcttggctgccaaagagaaactcggccgagggaaagcgagtgcattgccatacgctccgtcaaagggccataagtctgtgatgaagggggagtctaagcagcctccttcttgggctggcggcagtaagacggcgaactgatcgtgtgaccgtcatggtgcgtccagtcgatccggccgatggcttcgaagccgcagcgctcgtagaatggctcggccttgagagatcgaggaaggaaggaagcgtcagcatgtcggttcccgcacaaggctgacaccggccgactcacgatcggcgacgactcgcagtggacaggaagaccttcggcgtcggcccggtcaaaggcccactgcatcagcttctttccgattcccaagccctgcgccttagggtggacaacgaggaggctctgcgggcgagcgaaggggtgagcgtctcatagctactttttctgataagagcgagtggacgcacgaggtaccaatacggcgcgccggcgtggtaatcgtcgcgcatcttcgtcgcgagcgagccccagagcttgagataatcgcgtcgttctgtgcggcaatagttcgacgtcaaccggagattcaccccgcagcaggcttgacgagaggtcgctcacctgtcttggcaaacagagcctcgagttcctcgtcgaccggctcggacgactccgtcgccattgcagggtccgcccgtgactgagtcgcgtcgcgcggcttctcccatttcgcaaagccgaggaggacgtccggggtcgaccgccgcgtcgctttgacgacttcaaaggtgcgtgcgacctcgggcgagagccggcgctggctgtagacgccccagcggacgcgcgtctcaaggtctggccggagatccttcggcgcgtacgtcgcgtacgacgggttgtcctccatcgccaggagccgcgtccggacgagcgcgggccagtcggcgtcttcgacggtcgagaggatgatgtcgtcggccggattctcggccttgttgccttcggtgagagaagcgatgggctgtggcggccgttccatcgttggcaaggttagtcttgagtcaggtgtggacccctcgaccgcgacttcgccgacgacccgaaagtgggcgcgctcgtagatgggcaggccctgaggaggttggtgagggcttagcacatcggcagattgattgcgctttgggaaaggacgtacggccggtgtcgcctcgaggtacatcgggagcttgtcgcggtcggcccgctcgaatccccaggacagcagtgccttgccgacgccgaggccctgcgcggctgggtggacgagcagcaggccgagcagccagtacggtcggccggcgtagcgcgccttacgctcgtcattcatcgcctttttgaagcgcttgtagaaggccaagtcaaagtgcgcttccggctcccggtcgacagcctcctttgtcgcctcgagctctgcctcgcgcgcggcctcggccgccttctcctcgggcgtcggctcgccgccggtcgatgtccggtcgtgcggcgaggaccagatggcaaagccgactggcttgccgtcgagtagggccgtgcagcggacagtctcgggcgcgacgtacgtcgaccgcgtgtcggaccggatggcccagcctgttgtcctcgaggcgtgagcgatggcggcgcggagaaggtcagcaagccgggccttctcctctatcagcgcctgcctctcaagcggaaagccactcacggatccggtcctcgaccgacggccgaggctctggccacatggcctgcgagatgtcggtgtcgtcaaaggcgagcacccgggcttggcagaaggattcggtgtcgcgagctgggtcgaaggcagcgacggcgatggccggccgcggcttgacggcgccagtgttcggcgacgtcgggttgatgatcgtcatgggtgcgagctgcaaagtaagaggaggctggtgagaagttgggagagtcaggatggtggtcgagaaggaaggatgactcggagggacggcgtcggagggaagccgacggaagcgaggctgactctgactgcgcgcgcagcgagagttcgaccgtgcaccatgtcctggcacttgaccggcctgacaaatgcagcgtccaatttgcaacctctcgctcgtcggtacaacgcccagggagcggtcgatgacaagatccgagtgcagccaaattctcgttggtgagagcgatcccggcgaccctgcgacctgccctctctcgacccgcgacaaccacttgattctcaacgagctcttttcgccctctacgctatatgtctcgttcaagcaggcttcggggcttccttaaaagacgagggcgagggcggtgacggacatctgaaggaaggcgcgggagagcgggtgccgacggcagcagacgacgtgagggggcgggaaaggggctgccgtgcgatggaggtcgacttccgtccctttcgtccgccagtcctgccgtgagcgatagagcagctctgccaactgggagagcccgactctgtcgatcggacggtcagctgcggactcctccagcgcttccgcctcgtctcgcgcgcgcgcacgtacacccagccatcattcccccctgactcaagcttcgcacgaaatcgtctctgttgggtcgtctcatggatcacacgcgcctcgcgaggggtcacacctagttcatcttcttgatgagcgtgttaatggcgtcctcacggaggccctggtcgccgccctcaacgtagccctggaacttgcgctggcgccagccgccggtcgggttcgacagcttgaacggccagaggaagttggcggcggccttgaagttggggccgacggtcgcaatctcgtggacgaggtcctcgatgcagatgaggcccttggggccgagcttctgctcgatgacggcgttcgagctaatggggatgcgctggccgttgaccttggcgtatccgcgcttgtagatgagcgagcggacctgaaagaggcgagaagcgaaggaaaggggggggtcagcgacagaagggcaaaggcgataagggactacggggggagcaaactcacggtggccaggttgggctcgccgtaggtgatgtagggctcgacgagcttgagcatctgggcggtcgccttggtgttgcggacgaagacaccgttgttgatctggagcagccggaggagctgcaggatcttgcgcggcttcggggcaatctcgttgataccgcggatgcggacgacgaagaagaccttgggctgggcggcaacgtagaagtcgcccgaggcccgggcctcgcggcggaggcggacctcctccttctcggcggccgtgtactccttgacgtactgctcggcgcgcttgaaaatgaccttgcgcttagccttctgggcctaaaagcggccaaaaggggaagcagagcgtcagcacggaagagcggaggagatcagagcaaggcgagtcggcagagcaaggaacggagagggaagggaggattctcagtcccgaaagatggttaactgtggacatcattgccgtgcaaggctagtcgtagtttggcgcatggatagcgatatgcatcaccgaatcctcccgaggagggcgtggtggtggtggtggtggtgatgggtcggggccgtccggcgaggctacgagggccctatccgacagctctgcagcagacggcagccggtgctcgcctcgctgaacagctctctacccggacgacacaagcgagcgagggcaagaaggacgacgcaccttcttggcctcagcggccttggcgagcttgtcctcccgggtcttgtcggtggacttgcgcttcttgagcagcgtctcggggacggcgatttgctgtgggtagacaaagaggagagggtcagccgacaggcgagtcgacaggagtggattctgggcgggccggttaggagcgggccggcgaccttgggcgagcgacgataaagcgcatccgcccgaggcacgcaggccgcgagaggaagcgcaacggagcgagcggccagcaacaaggggagtggcgcaggacagcgctgcagcagcttcaaccaggccgagcagacgcagcagtctctccgaccggtgggtgctagctggcgtacctgcctgcccgtctgctaccctctcgtctgtggctgcctgcctgcctgctccgctcaacccgacgtgccagcccttcctgctccccgatcctgagcccgcccgagtagcgcgaggactgacctcagccgaggggacggtgtaggcggcggacatggtggtctgcgaaggtgcgagtgcgcggccggggcaaggaggcagcggcgaagagcgacaggtcggaccggttcgagagcagcgagcagaaacgtggagcgagagagggcaaggagctgaggacgttagtgacggcccttgtcgcttatcttgcttctagcttggacgtctactgacggatgtgtcttgacgaggggggaaggcgcaacaacgacagacagcagaggcggagcaagagcggccaggacgagacggagcggcggcggcggcggcggcggcaggggagcagcgagttacggcccatgcgtgactgcccccgcgcagcagacctgcactcgctcggggaagggagcggggagggcgccttgagagggaggtgaagggcacgtgcagtgtagggggtaggagcggagggagcaaagggagggaaagttcagactccctttacttgtggcggaggtacgatccgacgaccatggcgtggtcacctgagagtcagaagaacggagagggttagcgtcggttataagcaccgggcagattgagcgaggagacgcacgctcgtaaggctcaagcgtgagctgctcgtgaggcttgatgttctcctcgaccatgcgcttgacctcggcggcgaagacggcctcggccggggcggtcgagtcaatgcagctcgccttgatcgagacgacgacgtggccgccgttcttgaggaagtggtgggcgttaagggcgacgatacgggcctggtcgggctgggcaacgtcggcaaagataacgtcgacctggctcatgagcatccggtacttgttggggtaccgggcgtcctcgatgatcgggatgacgttcgtccgcttcttggccatgttgatgaggtcgcgaccggagcggtgcgagaactcgacggcgtagacggtgccctccggtccaacaacgtcggcgacgtgcgagaccgacgtacccgaggcggcgccgaggtagaggaccttcttgcccggagcgacgtaaatctcgtcgagacctccgagaataccggccgccagcttcgaacggaaggggttccagacgcggtactcggtcttaacctcgagaccgtcatcgccaggcgagccgatcgtaatgcgctgcaggagagaagcgactagtcagtagctgctgaattccgagtttcaacagcactcagtcggtcaggacaaaccttctcgccgtagaccgagtcgccggggacgaggttgcgggtgacgaggaggtgctcctgtaaacagacagaaagcatcagtctctgctccaggctgcagggtatgaatggagacggcaacggaccttgcccttggcgatgaagacaccgttgtgccggtggggctcaaggatgaccgaggcgccacccttcttggctccgaggccggcctttcctccaccacgggcaccaccacgtcctccgccacggggagcaccacggccacggtcgccgccacggcctgcgagaagcaaagggagggaagctggcggtcagcgctagtcgaggtcgtgacttgatcggcgggctgaaatcttgccggcgagcgagacgacgcccgacgacaggcgtcgacaggcccgtccggcaggcagaggaacggacgtaccacggtcagagaagccaccacggcctccgccacggccgccaccacgacctccacggtcgccaccaccgaagccgccacggcctccgccacgaccaccgcggtcaccgccgccgaaaccgccccgtccgccgccgcggccgccacgctcgccgaaagccatctttgctgaggggtgttgaggagttgaagagaggagggtccctgaggaagaaggggctctggagagaagacctgaggaggggagtccgacaaagagggtgctgtggcgggttgggtcgagctgaaaggaggagagaggccagagggaggggagaaggcgagcgcaggcaggcttgcagggcgcaccggccgggcggcggccgcgccagggcagcgaaatccgccccggttttcaattttcagactccgccctgatgcaaggtgagcggcagcgccaggctgagcaccttggtcggctgccccaggctcggcgctcgtcgacgctccctaacgacgtcggacgagcaccctctcgacttgcacctgctccttccatccctcgagactcgtctgcagccgtcttggccctcaggtcgctgcctggacctcatcaacaacaaggccgcctctctctcgctgtctgccgtcgcctccgaccccttcggcgcgtcttccaactcgtcccgcagcgtcctcctcgacctcgcgcctccatccgacgccgtctcgtctcgcgtgagtcgaactgtcctgtggctcatggcacctcacaaatgactgacgagagacaggccacctcagaccgatccgccgcacgaccaaatctagtcggccaaagatcagtatcgctagaaccacgccggtcgctcgtctcgccgccaaccggcacgcccgactgtcgcaggctcggcagctacccgccgcaaactggagtcgctctagctcgtagcctctgctaatactctgaagatggcttttgcgagctcgtcgcaactggccaggaagcgttcatcgcgtgagcttcagccctgcgaccctttcccagccgagggtgacactgaccctgccctgcgcacggcttcttctctctccctcgcccgctaggccaatcatgcgtgctctgtgctagagctctacaagcgcggctcgcgcacaccgggtcaggagagtcaagtttggtgagtcttgcttgcggttgccttccagctctcgagctacacctcgcccgaggctctcctgtctgaccccgagctcttcgccttcccttcggtgtccgtcctcggctctttctccgctttgaccaaaaagtcgaccggcgtttccactggctttctgggagatacgctcattaccgacacggcgcgccggagctatcggcagctcggcctcagctggggagaggcgcccgactcgtcactggcagacggcggtcgaggcccgtcgacgtcttcgacatcggactctcgctccgatgctgtcgacctggcctacccttcagcgagtactctcagcaagcttcggtgggccggttccgtgcagctcgatagccaacaccgcaggcgccggatgcccgaaaacccgccgctgatggaggcactcaaggacccgctatcgacgacggcgctcgagtacccgtcgctagtgaatcttagcctcttctgccatcatccaccttggacaacacgtcggcctgctcggcatcatcaaaaaattaggagaaacgagcggctccgcgaactgcttaccaggcgattcgccgacatggctacagatggagggcctcctctcgatgacccgcacatcgagcgcctcctggatgcctaccgacgagcttccacgcagatccgagccgagctcaacgtttggtcgaatgactactggccgcactacgtgtcggtgccaaacggcgtccgttctgcgcgcaaggagttgccgctccccaaagtcgacgaaggaggaatctcggagcagattccgcgagacgagccccttgctccactccgcttcccctcggtcgacatgcgaggcttacatccgcccattgcgcgcgagcacatcccgcccgcgccgccgacaaagcacgctgcgatgcgcggctcagcaaggctgtcgacagctctcgctcccctcgggccgttgccgccacctgccgacgctctcacaccggccggcctgccagtagttgagaaggcaacgccagagcacgacatcgaaccggcagagttgctcggaacgcagacggcggtgctcgaggccgaagtagcgcagctcatcgcccgagcgtacgtgccttcggacgattcggtggtggccgaaccgccgggagttcgagggatgcggaagaagggcacggcactgcgcagcctcccatcggcagctctggcgcccgcgctcgaaccggcactcgtgccggccagccggccctcgctccacctcggcgatcttccgtccgcgccatcggccaaaccgccctcagttgacgtgccttgcaatgggcgcgcgtccaaacgacctgttggatctgaagcctcctccagtgcgaatcgcatggacacgagagcattgggcaaggtgcaacggccgccatctttggcgtcaacgacaaaaatggcagctcacggcggtcatgctctcgcccgcaagggacctccttggttcgggttggccccagcaccgccgcctgatggtcctcttgctcccacccgacacccgctcgatgatagcggcctcaaggactcgctgcactcgaaagggtctcaaaagttgaagactcgtcctgccggttctcggttgacgcccatcaaacccccaggcgccgctgctcgatcggctgtcacgctcgcctcgtgggcgacaatcgccctgccccctgctgatgtgccctctgcagcaactctctcggctgcggttgtcggccctgtaactcagaacgaggccggttcgacagcggtggtcaacgccgagcggccggcggcgagactgccgtcagacggcgagaggccgccgcttcagtacaagaggtcgcagctcggagtctcgtcgcctgcagccaactctttgccgctcctggccacggtcgcagcttcgcccatccccgccccgtctcgcgttaccatctcggatcccgtcgctctcagtcgagaggaggtctcgaagccgtcctttgcgggctcggagacgtcgctcgagcgggagaagtcttcgcatacggaccgccatcctaggctcgtcgagccaccactctcccgaaaggttatgtctccggcatccgttcctaagggtgtacgactcaccaagcgaggtcctccggagaaggttgtaatcgaacctctgcgggacgagcccaagtctccggccaagaaagtcgtccggcctaccctcgagtcaagccctgtcgagcacaagcaggagccgacaagttcgatgaagaccgaggtaacgattccggtggccgcctctccgactgtcgcacgcccggcggcagaaaagcggccgtctcctctgtcgcagcagacgtcgtcctccaaaagcggtcggccgaccgtagtcgacggcccgccagagcccacacctgcgcacccttgggcgtctcgggcgacaccccggccagtgctcttcttcggcagcccgcgctcaccggcaccgcctggcgacaaaggccatgcggcatcgaaggtcactcgcagcggtccacggatcccattggcgacgcccaaagtggcacctccaacatccgacatcgatcggccgtcctggcgttcgcagcttccggatcaggctcggccctcaccgtcaacagcgcccacttcgcccttccgaggtggcggaggcggtctgctgagcgactcgcttgcggcgcagctcgcgcttgaggcggagcattggcggcattgatgatgtgatgcaagcgatcgctttctgctcgaggtggtcacgtcaggcgagagtgtgtgccagcgcggttgtccgggcgatcgatagagcgcgggcaacaacgagcccatcgccttccagaccacattttctcgacctgtagaccttacggcccctcgtcatgaccgaggtggaggacactgactgcgtgggtggactacggtcagccttcgcgcttcttcatcactgaccggggccagcagcgacgttgccacccttttcctgcgccgctttgctctgagacccgcccactcgcccgctcgccctcggctaagatgatgccgaaacctcgctgacagttctagagcatgcgcgtggactacggccgagctccttgaggcgctgagacggaccaatcgtcttgaacgcgttcggacggcaccgccatcaaccatactgcacgcgaaggagaccgatggaacgcgtgcgtccatcgactgcagccctgctgtcttgctcgatcgacatgcgtggctcgccccctcattgatcttgcgtggccaagtgcgaggctcttctgaaggataagggagcgtccgtctctttcgcccaacagtcacttacacaccccttctccttcaacgcagcgcctgtattcgccgttgcaagcctttcttgcccctgcaacctacgctcatgctcgcggtcggcttgcttgcttctcgcccccgccgcctaggtcgagcttcgccagagtccaaagggtgtagataatgcaaagcgcttcgctccctcggccgttgcccgcgtcttcatctgcctggttaacggctgtacgaggacgctgaagagcaccgcatgcaacgacatcgccactttctggttctacgaaccgtgcttgcacaataatcaagagtgcgtcgggccgtcctagccggaagtaccgctccgcccctcagactgaccactctagcgcttatgccctgcgaacttacagcccctgctcctgcgaatctgtctcgggtgttctctatcaccagggcgccggcgaaaccgtctgcggcaggattgcgcctcgcaacaatccgggctgcgtcccacaggccaagcgggacctctctaagctcgaggaggtcacccgctcgcgctggtacacgcccgaagcggcgccgccggcagtgggtcataggagagagcgatggatcctgctactcttcgtcgccgcggacgaccttcaccgccgtacatgcctctcccctcgcgcctcctccccttcctgaaagcaaaatcctgcgacacctcatcccaacgttccgcatcccaggatccctcgtcagttgtctgcatcttgcgaaccgtcggtctcgttcagcagatgtcagcacagccagtcagtcgacacgggccagagaggtagcccgcactgccgaaccacacgtcctcgtagagccgacccaaaccaccattcagcctacgcgggcgcgcgcgcgcggaagcagccgctcgtctcaaagtctgagtcatggtctcagcccagcaccgccgccttctccaatcctatgtcctcctgctgacgcgttcggcatttctgtttagtgggcggccttcttaacctcggcctcggcgtcggcgatgaatttgcggatgctgtcggcccttcagggaccgccggtcggatcgcaggacgtaccattaagaacaaggggaggcaagcgaggtcagcgtaatgcccgccaaggaaagtattgcagccggacgagcgagccgggccgtcatccactgcagcagagccgctcagatggcaacgctccgggagaaaagggtcgactgacaagtcctcctcctccttgccggcgtccttgacgaaggccttgaccttgtcgaccttggtctccgggcccgacttgcgagtcgcggcgaagatactagagtcacagagagcgcaaaccgaggggaggcatggacgttagcctcaggcgaggttgggagaggaagagcagagcagaggacggacccgaggccggtcagggcgtaggtgccgagagcactagacgaggcgggtgtgttcaggtcaaggcaagacgagcggccagcgtagcagaggagggcgcgagagaggaggtcggcagcaaggtcagtctcgagcagtacacgccgctcctcgctcgaccacaacccaagaaggacgcagaggcgacggccagagcacagcaagcaaagaagcctcgacaaacaggtactcctacaggcaatggagagcatgcgcagatgtcagctcaaggatcgtcgatcagagaggaagccggcggtcggtcgggtcggcttggccttgaagccgaacaggccagctggaaccgaccgaccaaccgacgcagcagctcctcgcctctggtggccgaggcagaatcacgcaccgacttgacgaaggttccgaagagcttgctgtaggtgcgaagcagcaggacggcgggccggccaagaagggacgagcgtgacgagtttcggatcggacgaaggacgaggacggaggagcgcgcagacgaagaggaagcgggtcagccctctggtcgacctccacgcccgcatgggcacccttccgccagacgcactatccaccgccgccggccattgttgatgcgctagaaagagaaaaggggagggaaggggaagggcgaaaaggggaggagaaggagcgttgcgtgcggtgcgcaaagaggtcgggcgggtcaggcatctcggcctcgtcgcaggtaccccttcaacctgcatagagcgtgggagaagccctctcgacctgattcagactccgcccaatggaaaaaccggcgcggcccgcagcgagggcttcggacggagccgccccgcgcccgcgccgcgtcccttcagcccagcccaagatcaggccactttctcaactctccctcacccatcaccccctccctcccctcccttctccaactcctttcccttcttctttcaaaatggtctacaaggttgccgacagtgcgtccttgttgcccgccaattgcctttgaaatacagggctgaccctcagtctccgtcgctcctcctgccagtctcgctcgcgtctttcggacggtccgtcttccttcctctcggccatcaaaacaagagcttctgggttccttgcaagatgcagcgactgacgctgcttttctcctcgcctgatcctctccagcaaggagatcgagcttgctgagcgtgagatgcccggtacgtccttgttccttgcttgtcgcgcctctgcgctggcaccttctttcgacaaacgtggcgactgactcttctctgactttttcaggactcatctacctccgtgagaaggtgcgcctctttgcttctgcacgacagcgcaggtctcttcgctgggctggagcccgcctggcacatttcagcatcattagaggaacggccgggctgactgctctgccctccctgcaatcgccctctagttcgccaagacgcagcccctcaagggtgcccgcatcgccggctgcctccacatgagtgcgttgctctcggcctcgtgcatttcgatcctgctctgcaataattgcctgactgacgccgcaacccccccttttcttgccttgccatccatcagccatccaaacgtgcgtcaactttttacgcgctgctgagctggtccgttcttctccgcgagacatcatctgacacccatctccccttctcttcccacagcgccgtcctcatcgagacccttaccgcccttggtgcccaggtcacctggtcgtcgtgcaacatcttctcgacccaggaccacgccgccgcggccattgccgccaccggtgtccccgtcttcgcctggaagggcgagaccgaggaggagtaccagtggtgcatcgagcagaccctcgccggcttccccgacggtccgtccctcaccccggcttgtgcctcgccccgcgacccgcacgcaccgcgggactgacgccaaacccctcaaccccttaggccaggccctcaacatgatccttgacgacggaggtgacctcacgaccatggtccacgagaagttcccccagtacctcgccgacatcaagggtgtctcggaggagacgacgaccggtgtccaccacctctacaaggctctccgtgagggcaagcttaagatccctgccatcaacgtcaacgactcggttaccaagtccaagttcgacaactactacggctgccgcgagtcgctcgtcgatggcatcaagcgcgcgaccgatatcatgctcgccggcaaggtcgccaccgtcgctggtttcggcgacgtcggcaagggctgcgccgagtcgctccgctcgtacggcgcccgggtcctcatcaccgagattgaccccatcaacgccctccaggccgccatggccggttacgaggttgtcacaatggaggaggccgcccccaagaccaacgtctttgtcacgacgaccggctgccgcgacatcatcaccggcgaccacttctcggtcatgcccgaggacgccatcgtttgcaacatcggccacttcgacatcgagatcgacgttgcgtggctcaaggccaatgccaccgagtgcgtcaacatcaagccccaggtcgaccggtacctcgtcaacggccggcacgtcatcctcctcgccgagggccggctcgtcaacctcggctgcggcaccggccacccgtcgttcgtcatgtcgtgctcgttcgccaaccagaccctcgttcgtgcccgctttgtccttgtgctcccttttcgaggaacttgcgctgacgcctgcctgcctgcacttcttacactgccttgctcttctattctctcttcccaccctcccttccctccttccgcccctcctattcatccctctcactccaacacacaggcccagatcgctctctggaccgagaacgagaagtacccccttggcgtccacattctccccaagtcgctcgacgaggaggtcgcccgggcgcacctcgcccagctcaacatcaagctgacgaccatgaccaaggtccaggccgactacctctcgctcccggtcgccggcccttacaagcccgaccactaccggtactaagcgccggcacggtttcggctttgtctcttcgcttctttttacttcttccttcaatttgggtcgaggagagggttttgcgtgcttgctgcgcgccccttctcgcctgtcctacccctttcttcccctcttggccttctcgttcctcccttgtcttagcatcatcacaccccttatgagcgtccccgcggaccacatcatcacgatccgctaggcggtgtaaaagccttctttccccaggaataaggtacccccactcccagcatctcctgctttcaacggctgttcacgctctccctcttacgacccaccactccatagagtcccctccagcggacctctctctctctaaaatggcatcaactgcatccaagacgggtcccgtgaggcagggcgaaagaggatcaactatgtctggccgctgcgcgcgaaggcaggcgcaggcaggccgataaggcgatgatcgactctcttcctgccactcatccgctcgctcgccttatctcctcttgttgacgcgtcgctcagctcgcatgcggccggccgtctcccatctcgccctgctcaagggctggccaccccggcctatcggcctacccagcaacgagtgatcgaatgcggctcgcaagaaggcagttattcccccctttctgaccggcgggacgccagacaatcgcatgcaaaggctcttgacatccttcttctcgtccccctctctcggtcatcgaggcattgtcgcccgaccccgccgccaacgacttggcgagcatgcgcctagtccagcagaccgctctgtgaggctcgcagcctcactgcttcttctgcgcatcgaccttggcggcctcgacccagtgaccggcggcgtccttcttgcggacggtgaagcaagcaatgcccatgtactcggtgctgcgatgcaatgtggcgcaggtcagccttcgctcttggctgggaatcggcgcaccagcgaggcgacgggctggacgtacatctggttgatgaccgtgtaaacgaatgacccgtaggaaaagaaggcgagcgcgagcgagtaggcgatgaagacatacgtccgctcaggcgtcgactgaaggacgggcccgctgcgggtgagcagaggtgcgcatcacaagacgaggtcatcagcaacggcagacaagcaaacgaggtgtgcgacagtgacaggtgggcccacgtacctgccaaagtaccggccaaggttagcgtcgagcatgccgatcgcggtccaacccatcatgccgttccagaggggaaactcctgcttggtgacgtgcgcaaggatcatccggccgacttggtaggcaaagccgagcccccagaagccgaggaagggaacaaaagctggcgagtcgataattccgggcaagccgtggagccaggcgacgagcatcgccgtctggacgacaaacggcaagaggccgaccagcggcgtgtagatcgactggccgctcttgcggcgcgagacgatgacatttttgtacctgtcaagggcagcagaaaaggtcagccggccgagcagcaaagcgatgcccgatgaaggccacgcacgagccggcgacgttcgacgccagcgcaaacgcgctgaagatcatgaatacgtcgttgatgccgagttggaagagccacttggcctcggaccgggcggcaagactgggcaggagctcatcgagccgcaggagctcggcaggacgctggtcccagaagctcgggccgtagacgcctgtgggaagaagcagccgaggcagcagaagccagaggcagcgagcgaggcgtcagggatgacgcaaagcacatctggccaccgagaaggacgcaccagtgatgaagtacatcgcgacgattagcagaatgccctcgaccgggccagagaaggccgagaggtagagcgtgccagtgtggtactcctcccaggtcgttctgagggcagagtcaggcagagctgggcgtcagcttgatcactcgcaggcaggccggagagcgagaatctgtacggacaggtagaaattagagagcgtcgctgcctgcgaggcgacggtccaccaggaccggccgaggttgagcgcgtggcaggtaatgatgacctcgagctggagcgaacgagtcgggagcaagaggcgcaatcgtcagcaaatgctgcgctcggtagtcgagtagagcaagcaaaacgggaccaaccgtcgtgttcatggcgtcgcagccgtgatcaaacatctcgccgagcgggccggccatgcccgtccgccgggcctgcttgctgcacggtcaaaggaggcgagccgcgtcagcgaagagagtcgcgctaatatgagaacggccatcacgactgacccgtcaatggcgtcgagcgactggtaggcgaagaggccgatgccgaaactggacccggccgaggataggacgtggagctcgtgtcagtgcgcgtcgctgagccggcgggcggccaagccaggcgtcaagggacgcacgcaaaataggcccatcggggcagctccttgtcggtgtactcggggtcgaggacgagcagcgtcgctaggttgacaaggatgaggcagaggcccgagaaggtgatctgcaaccagggcgcggcgagaagcaggaggtcaagggggcgtcagctggtggttcgcgagctcagacgtgagcgacagaagagacggacagtgttgggcgcaatccactttggaaagaggaggacgagcttgttccagaacgggttgagcacccacttgctcgtaatcgacctggaggcaggtgagggcggtcgaaggaagggaggcgggcgtcagccgtgacccggccgttggtggttagagctcgtctcctagagcagagaggagaaggaccgacttgtcaatggccgagtacttgctgctcggcaggcagcgagggcgaggagacagcacaggtcaagcatcagcaggcgagcgagagaggcgcgtcatcatcagctaggtcaaagcactcgccggtcgacgggcagacgcactacttgtggagattggggagcttgtcttcgggaataaagggtgccatggcgggcaaaagctgacctgcttgaatcagggaggcaagaagcgagctggaaggggagagtgtgatcgtcgtcgtcgtcgtcgttcgggccagggggcgaaagcgagcgtcggcggcgacggcggctctccgcgcgcgccggccaagaaggagcgactgacacgttcgaccgcctgggagggatgcactttgtcactcgcttgcctgaacagcagcgctttgttcgagtcttccttagggatctggtgaaaagagtatgtcatcgagcccccgtagtcctctcgcccaaggacggccccgttctgacaggcacgcctctgcgccgcctcatcgggccccttgcctccgccctctcctatgtgatgtacgagaggaggccgataatgcagagaccgatgatgacgccgaggatgatattatcgcgccggcgcttcgactggatgaggccgaggagcgagttgatgccgggcagctgggctggaggaggcggcgaaaggtcatcagcctgcaagccctctggcggccctcgaagatatactagatgacgcactgagcgtctggcccaatcggctctggacgccggtgatggtcgcccgttgcgatgcaaagtcggaccgggtcgcgtacgcttgtctgcaaggtcgatgagatcagagtttggtcagcgcgaggtgtcttccaccaagggcgctgagcgagtacggtctttcagcgacaaagagagcgggacgcactcgagtatgtcgtcggtcatccgatgcgacgagtcgattgtgctccgctcgttgagcagcgcatcggccgccgaacttcgggccgtcttgtaagcgctgtgcagacagggtcaaggtcgctcagcaatagagagcctcttcgctcactcgagtcctatatcagagggcactgggacgaacgagatgtcacgccggacggagccgagcaggttgcgcgagttgcgggcgtgctcgacattgcgctgcaagcgtcataacaagggccgccagccagatcagcacgcaccctttcaacgagatccgccaaacgaggcttcggtccgcgcaagtggccgggatcgaacagcagttgcgtccctatcgggcgacagactagaaggctgctgcgtgcgcagccgacgaaaagcgagggcagggaccgtgcaccttggtctggagaaagtcccgtcggtagtcggccaggacctcgcgatgcctctgcgaggcgttcagtgtgctcgtcgacggtgctggccggtcagggttgttgatgacctcggtgagctgatcgaccgttgctgtgagctgcggaaacgggtgcgcgagcgaggttgtcagactccagccacaggcatcaggggacagcatcttgcagcatgcgagtgacccgcgggcagacagccttttgccatccttgcaggagctctaggggagagacggcggtgacgcaccttgcctagaagctcctcgacctcctcctcggccaccttgacgccgcccgactcgagctcgtccaaatcaggctctcccggacccgagcccgaggaggacgaaggacccggtgaactcaagtttgacgcgagcttggcgtacgtcgtcagcttcgagtcgagcgaggcctcgagcgtccgggcctgccggcggagagctggagggggacgagggtcgacatgtcagcctgtatgaggggcggctcagtcgacaaggcgcacacgcgcgcgcggagaactgactgtcccatgagggcggcgaggaagagctagccattgctgagctgcgaatcaagggacgcaggagaagagttgatggtcgagacgacggccggaccatcgcaagccggcggcgtccttcgaggctgagtcggtaaccctagctcgcgctcgcctcaccgccccgccatctcgccgccggcgccggcttggccttgccctctctccgaaccatcaacctcacccctctatactctgcgccagaagcatggtgcgtcccagcctgctgtccggaacagggtttgtcggtaaaatctaatgtcgaaacgcactccctatctcaggcgccctcgaagaaggcaaagctcaaggcggccgtcacggccaagagcggcggcggcggcggcggtactgcgagcggcggcaaggtcgccaaggtcggtcctcctgccatgacttgagaaggaggtagcgaaaccatcctgtaccccagcgtatgctgacgaggatccgactgccactccgacgcgccaactcaggccgactggaaggacggtttcaagaagaagcaggctggcgtcagcgacatgacgctgctgagcacgatctccaacgagagcatcaacgagaatctcaagaagaggtttgagaataaggagatctacgtgcgttcctccttcacatccggcatgctggctttgcgagccacgcgtctggcggagaggaaagacgcaggctgttcctcgcttcgggacggggtgacgcacgcgacgccgcccttgtcccgcgcctggccctcctcgggccagcgagcagggcgcagcccgtctgcgttgcgattcgttcaaggacgctgacactctgccctggcttgacttgcgcagacctacatcgcacacgtcctcatctcggtcaacccgttccgaggtgcgctcgagctcggctctgggcaagagtcgcgcgcgcgcgcttgctggcccgcaatgagctgacgcctctctggcccacctcgtccgcagacctcggcatctacaccctgccgacgctccagtcgtacaagggcaagaaccggctcgagatgccgccgcacgtctttgcgatcgcagagtcggcctactacgccatgaacgcctacagcgagaaccaatgcgtcatcatctcggtcggtctctccccgtttcgcactctcgacgaggttggcagagcagctgaccactgcatttatcctgtagggcgagtcgggcgcgggcaagaccgaggcagccaagcgcatcatgcagtacattgccgaggtctcgggctcggatccggcgacgggcaccgctggcggcaacattggcgagatcaaggacatggtcctggcgaccaaccctctgcttgagagcttcggctgcgccaagacgctccgcaacgacaacagctcgcgacacgtgcgtcgctcggttgcggcccctgccttggcgccgtcgcttgctgactgtcctgccgacctgctctcctctctccgaccgacagggcaagtacctcgagatcatgttcaacaaggccggccagccggtcggcgcccagatcaccaactacctgctcgaaaaaggccgggtcgttcagcagatcaagaacgagcgaaacttccacatcttctaccagtttaccaagggcgcctcggccgagcagcggggtgcgtctgaccgcgtctcttctctcgttcagcgccgacggccactgaccttccactcgactacctttcagagatgtacggcattcagggtcccgaatcgtacgtttacacgtcgcgctcgggctgcctcgacgtcccctcaatcgacgacctcgatgactttgtcgagacgctcaaggcgatggacgtcgtcggcctgacggcagccgagaaggaggagatttttcgcgtcatctccggcatcctctggctcggcaacgttcagttcaaggaggaccaggagggcaacgcgatgatcccggacgagggggtaaccgagttcatctcgtacctgatggaggttgataaggccgcgctcaacaaggtcctcgtcacccgcgtcatggagactactcggggcggccggcgaggtgcgtttgaagtctctgtcctcccgctgcctcctcctgctgacctctttcttcttgcgcaacaggctcgatctacgacgtcccgctcaacgtcgcccaggccacggccggccgggacgccctttccaaggctatgtgtgcgttggcggcttcgggtcgaccctgccatttcagcgaccctcggctgaccgtcaccttctctgcgcacccttttcagacgagcgcctctttgagtggatcgtccagcgggtcaacgtctcgatgaagccgcggagcaagcacgagcagatcatcggcgtcctcgacatctacggctttgaaatcttccaagaaaacagctttgagcagctctgcatcaactatgtcaacgagaagcgtgcgtgtctccctcttcgtcggggcgagttgtttgatcggccggctgacccgcttttcctgccttggctctacgccccacagtccagcagatctttatcgagctgacgctcaagactgaacaggaggagtatgtacgcgagcagatcaagtggacgccaatcgactatttcaacaacaagattgtctgcgacctgatcgaggagaagcggccgccgggcgtctttgccgcgctcaatgacgccgtcgcgacggcccacgccgatccgtcggcggccgacaatgcgtttgtccagcggctgtcggcgctgacggccaacccgcactttgagtcgcgcgggtccaagttcctcatcaagcactatgctggcgaggtcctctacaatgtcggcggcatgaccgacaagaacaaggactcgatgatcaaggacctgcttgaccttgtcgacaacagcgccaacggctttctccgcaacctttttcccgaaaaggtcgacctcaacaaccgtaaaaagccgccgaccgcgggcgaccgcatcaaggcctcggccaacgacctcgtccagaacctgatgaaggcccagccgtcctacatccgcacgatcaagccgaaccagaacaggagcccgaccgagtacgactcgaaggcgatcctccaccagatcaagtacctcggcctccaggagaatatccgcgtccgccgggcgggtttcgcctaccgcaacacgtttgaaaagattgtcgagcgcttctacttgctctcgcccaacacgtcatacgcgggcgagtacacgtggcagggcgacgcccagtcgggctgcgcccagatcctcaaggacacgggcatctccaaggacgagtggcagatgggcacgaccaaggccttcattaagaaccccgagacggtgcgatgccctcgccgaaagttgagctatgccctcgcgcgctcgcttgctgaccgcccccccccccttttcatcacagctctttgcgctcgagacgatgcgcgaccgctactggcacaacatggccgcccgaatccagcgggcctggcgtagctttatccgttaccggattgagtgcgcgacgcggatccagcgcttctggcgccgcaaaaaggacggcatcgagtttgctcgcgtccggcagaagggccacgacctgctcgccggtcgcaaggagcgccggcgctactcgctcctcagctaccggcgctttgcgggcgattacctcgacatcggtggcaaaagctcaggcggccagcagctccgggcggcggccggcctgagcggctctgagtcggtcctctttagctgccgagtcgagctcctcaaatcggcgtttggccggtcgagtaagccgagcccgcgcttcctcatcgtcactggctcggctgcctactttttgattgcgacggccgccggcggtagcatcgtaacctcggtcgagcgcaaaattccgctcgtgacgatccgctcggtcgccgtttcgaacctgcgggacgactggctcacgttcaatacgacggcgagcgaagagggcgaccccgtcttcacctgcgtcttcaagaccgagctcatcacccacatgcacacggcctcgagcggcggccttcaggtcattgtcgggccgacgatcgactacgcaaaaaagaaggacaagcgggcgcagattacgttccgcaaagacccaacgaacccgcgactcgacgtctacaagtcgcatgtcgtctcggtcggccagggcgagccggcaaacagcgtcacgcggccgatggcacgtcccaagccgggcgtcgttcggcccatcacggccggcaagcttcttcgtaagggcggtccgtccaagccacacccaagcgctggccggctaccgcagacggcctcgctgccgggcaaggcgactgcggccacgcccaaaaatggcatgtcgtacgagacctcggcctcggtccccagcagcaaggctgccccggccgccgccgtcgccgccagcggccggccgacgccacctccgccgccgcgcgcaggagtaccgccgccgccgccgccggcccggccagaggtgccaaagtaccggtcgctctacaactttgacggccaagagggcgagatgaacctccggaaggaggacgttgtcgaagtcaaggagaaggacgacaacggctggtggctcgtcacgaagggcggcaaggagggctggacgccgtccaattacctcgagctcatcccgcaggccaagccggccgcgccgccgccaccgcctccgggccgccgggcgcctccttctgcaccagccgccaagccgacgccggcaccccccgccgcagcggccggtggctttaacggcgccgcgatcgccaacgccgccgcatcgctccggtcctctggcggcaccaacacggcgagctcgtcgccgatgagctcgcgtccaggctcgagcataggtgtcgggccacccgtcctcaagcccaagccgcccgtgctcgcacccaagccgggtgcgccgcctctcgcgcccaagccgcctgccgctcccaagccgcctgccgctggcgccacagccggcttcggcaggacgccgcccgcgcctcctgcgccgccggcagcagcagcagccgctgcggccggtggtgcgcgcaagccgccggttcccaaggcgtcggccggcctcggcgcgcccatcggtggcggtggtggctctttgggagggacaaagctcaagctgagcgccctcggcggcggcgccggcaagccagggggcggcatccaggcgatggacctccaggcggcgctcatgaagaagacaggccggccagtcatcgactgaaggacggctgatgacccttgccgcgtgaggacgaacgcctgctgttgtaaatcgatcgcgactctagatgacctgaccggatggcctgctcgttatgcttagaggccaatgcttaggggccaatcgcctgacagactgcagtggttcctgcaagcgtgcgcgactaaccagcggtcgtccggagaggaggcgagtctaaggaaagtggtcagaggcggcgttcgtctgtcgcctcggtccacgcaccttcgatcggcgagggcacaaacgacgagcggaggattcaaacgtgtcgtccagaccgacgagcgagtccgtcttctgcacaggcgctcgctctcagctcgcttcggaatggagagcgcgcagaaggagggcataaagagggcgcgctcgtgctgttgagcgttgacgcgagcgcgtacgggttgaaacggagggaggcaaggaggaggattgcgtgggcctggggcgccagttgggtcgggctggttgagtgcagcttttggaaacctctgccatagggtcgaggtcaggcacgagaccctgagccgagctggcacgcaactcatatcctgctgcagacggccgtcccagactctgtacgtatctcctgacccgcacttaagggcagcccctcgccgctgcttgctcggccttgcggaggaagccagcctgggtcgccgactcgctgccctaccgcccgcccttgtgccctgcctcggcctcgacgagcggacgagggacgagcgtggccgaacgagaaggaggacgagggaagaggcggtcgtgctgggcaagcgcgagcagaacagtctagcggatgaagcgcactgaagagagaagaaaagggttcagcggatcgaacgcttgccgccagcggtcggaaggaagcaaagcgaacaggggacggactgtaggcgaggaggagagcgccgcctccggtggcgaccgtcaccatgtactggaggattgagaactggcggcgaggcaggagggcgacatcaggtcgggcgacgaacgccggcgcacaacgacgacacgcccggaagcgggcccacctttgcgccctggatctgggtcctcagccccgcaatctcactctcgatccgcgtgtcgacctccttgatcttgagttcgtgcaggctcgcctcgtcgcggatccggcccttctcgaggttgaggtcgagtcggacgccggcctgggtgcggacaatctgctccttgagcgactgcttgagcttttcgacctcggacagcaagcgctcattctcggttcgcataagggcaaagtcttgcgactcgagcagctggagctccgacttgagcgtcgtaaagtcgactgattgagcgtacgactgcttctcctgctcagaccgcggaaccatccccgcgctcatgttggtcacgctctcgtcaaccacctgcggtaggaagccgctctatcagtctctcgcggccacacagcgctgacaggtcgtgctccaggacggacctcggccaaggcgcccatgacgcccgtcgcctgctggcggctgaggccttcgtgctcgagccgctcgatgaaggcctgggtgtcgaagtggaatgattggcgcagaggagagaggccgaacggtcggcgggcggcggcggccaagactgctgatggtgcgcgcaacggacggagggcagaggcgaagagcgacatgtcgggcgtggaaggagagagagatgggctggaaacgagtagacgaggagaggcggaggcgaagcgtgctcaacgacgagcggccgacggcaggatcggaagctaacttgtttgcctccgagcctctcagcccggtcttgggccgacccgccgagcagggaaaggacggccgctgcctccttgtcttcgacctgcatacacctctcccttattttcagcatgtctaccggtttgtccttggaggcgaagcacgagcagaaaaggagaaacttgatgtctgacttcttccttctcttccctcatctcgcccctgcccgaccctcccctgcgcttcctgactcggtcgaacccgggcatcgcctttgcctctcgctcgacctcggttgctctggcatcctcgccctgtttatctgcccggaactgtcgctctgataacgctcgacctgtcggccgctgcaaacccgctcgctcgctcgccgcacctgcctgtcgcctgcgttcctatctctcctctgctgccgggccttggcgcgcatcagaactccagaaaggcgtcaccgtcgtgtacgtctttcaatctctctgccgcctcctgcatcgggaaattgtgatcaaggcaaaggactcggcgacgccgtccttcttcgagactgacggctttcctcttctttcgctcgcagcctcggctcccagtggggcgacgagggcaagggcaagctcgtcgacatcctcgcctcgtcctcggacgtctgcgcccgctgtgccggcggcaacaacgccggccacacgatcgttgtcggcaagggcgaggacaagaagaagtttgacttccatctcctgccgagcggcctgatgaacgccgattgcaagagcctgatcggcaacggcgtcgtcgtccacgttccgagcttcttccaggagctcgaggacctcatgaagaagggtgcgtctggcgtccatctctctcgctcgcacggtcgttcgcccgcctctggaaaggcgctccgattcagtcggcgcctgctgcacgctcgaggtcctcccagcctgcagaacgcttgactggccgggcaagcggaacaaggatactcgaggcagggcttctcctcgcggaccccagtctttgacgcagacgtcacattgaatcgcgtaggggcgtctcgggtgggccgggtggagggtctaggccaaatgtgggcgcgctctaccgcggatggagtccttcgagcgtggaggctcggcgtgcagctgaggagcggagaaggagtgtgtgcggtggatcttcgacgaaggcgtacctcaaggagcgctgataggcgggcgccgacctcacccgcaagtaaagccgacgagtgtccgctgaccacttcaatcccctctcaggcctcgactgcaaggaccggctcttcctgtcggaccgggcccaccttgtctttgacttccaccagatcgttgacggcctcaaggaagtcgagctcggtggctcgtcgtacgttgtcctttcaggtgcgcagctctcgctgggctatcgctgaccactctcctgcacgtctcaggatcggcacgacccgccgcggcatcggaccctgctactcgtccaaggcctcgcgctcgggtctccgcgtccaccacctgtacgaccctgaggtctttgcggccaagttccgcaagctcgtcgagagccgcatcaagcgctacggcacttttgaatacgataccgaggccgagatcgagcgctacaaggtgcgtctctctcgtcacgctcgccaaagggccggcaaatgctgaccgcctttgctgttgtcgggtccaggtctttgccgagaagctcaagccgttcattgtcgacggcgtctcgttcattcacgatgccctcaagtcggacaagcgcgtcctcgtcgagggtgccaacgcgctcatgctcgacctcgactttggcacgtacccgtacgtcacgtcgtcggcgacctcgattggcggcgtctgcaccggactgggcatcccacccaagaaggtcgggaaggtcattggcgtcgttaaggcctacacaacgcgtgtcggcggcggaccgttcccgaccgagcagctcaacgtgcgtggctcgtcctgctcccgctcccgaagggtcagtgatctgacgcctcccgcactccacatccgcaggatgtcggcgtccagatgcaggaggttggcgctgagtggggcgtgacgaccggccggcggcgccgctgcggctggctcgacctttgtgtcctcaacttctccaacctgatcaacggctacgacagcctcaacctgaccaagcttgacgtcctcgacggctttgacgagatcaagattggcgtcggctacacggtcgacggaaaggacctcgcttcgttccccggtctgtccgcttccacgccgccctttctcgcgccccttcgtcgctgaccatcctcccttcctctcagccgacctcgagctcctcgctaaggtcgaggtccggtacgagacgctccccggctggaaggccgacatctcgtcaatcagcgagtacgccgatctcccggccaactgccgtgcctacatcgagtttatcgagcagttcgtcggcgtcccgatcgagtggatcggaaacggcccggcgcgcgagtcgatgattcgcaagccggtcgcctaagaaagtaagaaagggtttgcaagctgtagaccttctccggaaaaatctcgagtcgtcgggcggacccctccccatcatagacgagtcgccgcccttttgtagctcccctccctctccttcccctcctggaattcatgcgcttccgtttccgcctgcgcaaagcccgagtcgacgggcctgaggagggaaaatcgtcggaagaagggtcatgagtccagggcaggcgggcgggtcattgtcgtacatctcgaggcaacggtcggaaggggaggaggtcgggagacaaagcggtgacgcggtctgagcaggcggccgccagaaaggcttgctggtagcagagaagaaggtcgggggaggagaggggcgcttagtcggacgagaggtctgactctagagggccaccggccggatctgcgcgtcgagctgggcctcgatcaggagcggccggacctggtgaggagcgcgcagacgtcagcctcgaggagacggctcgacaaaaagaggagggagggcaagcgcaccatctcaacaaacaacggcaggacggtcggcaagagccggataacgggcggcgtgattgaggccttgccttttgtctttgcgtgccgctgggcctcgcgcttcgcatagagcccgtcggcgggcgggagaggtggccgctgctgctgggcgggagcgccgtcgggcgaggtcgacctgctcgaacctttgctcgcggcagagtcggtccggcgatgacccttgccccggccagggaggtggaagcggtgtccgccgccgccagcagccttcgtagcggccgcttcggcctcacgctgctcgcgctcgtcgaccgcccacgagaagcccgtctcgccctctgccggcgtgtcaaacggcctacgctcgtccccactcgcgccatacccgtcctcgtcgtcgtcgtcatcgtcctccgccccgatctcagccgcatcgccgccgatcgtcgagccgagctcgagcccatcaacgaccgaatcgatcaacgcctgctcgtcctctgcgtcgagcccctccgcttcggccccgcggacggtcgtccggaggaacttacgccggaccttcgactcgtgtgcgaccttcagcttgtagtgataaagcgcgatcgcgtcgacctcttggagcatcgcgagccgctctgggccggcatgcgggaggaggatctcgaggtcgagccgggtcggcccgcccgaggcagccggtgggatcccgtcgcggataaagtcgaggaagacttcgatccaggccatgagcgaggcgaaaaggtcggagccctttgagtggaccttgtggacgaagctgtagaaggcttgctcgtgccggtcaacaaggtcgataaacgtctggaccgtccggccggggtcctcttggctcactgcggcccgccaaagagggcggcggtcagctcctcagcagtcgccgaataacgaggcgagaggggggactcacgttcctcgacgtcgtcgacggtccggatgaggtcgttgataaacgtttggaggtcgccaagcgagtctgcgatcgaggccgccttgtagacctgggcgagcggggcgtagaatatagtgatgatgtccttcatgagctcggccgtcgcgctctgccggggtcggtggagagcggcgtcagggcgtgtacaggcaaggatagaaaggtgggggcattgcgcacctcaaaaatgagggcaatcatccgctccttctcctgcatgcgcgagtagagccgcatgagctgccccaagtcgacaaagagccaagcgtcctcctgatcgacttccggcccgtcgtcgtcgtcggagtcgtccagcgcctcccgctccctcttgtacgccgcatacgcccgatgtgcgcgaatgacccggagcatctgaggccggttgagggccggcgcgtcgggcgagcggaggatgacggcgaggaggtcgatcccttcctgctcggcgtcgcgcttgaagagcgcctggacggcccgcggcgcagcgacaaaggcccgaaccttttcggcgaaggctgggtcgccaatctttgcgctgaggtggtcgacttgctcttggagctcgcggatctcttcgttgatcgtcgtcgagaacatgctgggccggcggcggtggagggaagggaggggggagatcagcgagcggtgagagggtcacaggcggtcaacgaccgacgactgaccgttggatgaggctctggccgccaaatggacgtgcgaggaagagctcaagcacgcctgcaatatggacgacagacgagggggtcagcacggtcagcacgagcgggccgactcgaagcaggcgataggccggacgcaccgcgaatcatcgccatcgggttcgacacgcggaggatgcccttgaggacaaagtaaggcataaggccgtgcagccgcttgagctggccaaacgtcgccgaggcgtcgtccgaggcgacaaacgtctggaagatggcggctgcgaggctgcggagcgcgaagcgggggaaggggggcttcagtcggacggagcaaggttagagagggaggagggaagggaaccgacgaaatcttcccgtactcgagcaccttgcggtactcatccggcaggtccctcgccctctcgacctgggctagcacctcaaacacctttcggatcccccgtgactggacgacctcctccctgagctccttgacgctctcccggagctcctcgacccgcttgcccgcttcggcccggaagcgcttccggccttcatcccgcacgcgatcggcgtcctcgcgacgccgggcgtcggcgagttccgaggaagagagagtttgcgggccggagaggaggaaggagcggaggatcggggaggaggcgatttgaggcgaggagaggaggaaggagcggaggaaggagcggagcgtgagccggttcttttcgcgcgtgagaggcgggaggggcgcggggacggaggtggtggtggggtacgaggaggaggacgaggaagcgccggtagaggttgacgaggcgtcgccgctgctgctggtcgtcgtcgtcgtcgtcgccgagcgaaggggcgagctcgcgcccgggatccagcttgcaaggtacgcccgtgttgactggacgcccgcatagccgcttgccgacgcgtcgaccggaccgcctgcggtcgaggaagaggaggaggaggggtgcgaggcagacgaggtcggcatgggggtcagtcggtcggtcggtgagcggcgggtaaagggggttgagtgacgggccgcgcaccatctggagcatcgagtggaaggccgtctgaagcgtctcggccgtcagctcgagctcgagctgcgccttggcaatacctgtcaacagcctcagacccgtcagcacctgcccagacgcacgaagaggaaccaggaaggcagcgcagcaatcgatccgagactctcgtgggagcaagagtgaaactgacggacgacggccgtcctggacgaggcaaacgtcccgtccttcgagcccgcataggggtcaaacgtcttccactctgagcggcgggcgaagaacgagcgcaggcggcggtagaggtagcattcggcccagagccaggggatctgctcccagcccgtctgcgagtcagcatagcggccgacctggtcgttgtaggcggcgagatgcgagcctccgtccggctcgatgggcgccggtgaggcgttctccttgacttcggtcaggatctgcgagatggcaagcgagatctcggccgcttgggtgcgggcgagggccgaggttggggcggaggaggaagagagggcggcgatggtgtcgccgagaatgcgcggccagcgagtgatgagcgtctcgcgcctgacaggaccaggggtggtgctgatcagctgacggacttcatgcgctgaggtgcgaggagaagacgtacgcgaagctgcgtggtcaaggacaaaggcggggagagaggagaagcaaggggttcgttcggacgaggagggcatcagctcggacagagctcagctctcggcacgacctacgaggactgacgatccctccttctcgaacccgacgcgggcgacagggatggtccagctcattgcttgttagtcgtgaagagtgtaggaggtggtggtggtggtggtcgtcgtcgtcgtcagggtcgaaggagaaaggccggcgtcgtcggcagaagagggtcgggcgcgcagcagcagagtcaaggccggttcgctcggccgtccgaacaacgtcactcggctggccgacttgcagatgcatcagcgaagacagacagctccggtctgccagcaaagacgagtgtgagagtataaggcatgacgttggagggaaggggcgagcatcggacacgctcattctcttgacctgcccgcgcacagacgcccggcaagatgaggctgcaggctgttcttctcgactacctgctcttgttgctcgcatgctgcagtctgggtgttgtcgacgatctctcatgctctgcttgacgtccgctcgtcgctggatgccatgaccagtcgagatggcaagagtcgtcctgcagccctcgctcagctggcggcgaaaaggcccgctgtcggtcggccggccggtcatgcggcggcggcggccgagctgtcgccctctctctctctcgtaccgccctcgtccctcgtcctcaggccctcgttgtgctctccactcggtctgacgccagttcgagttctggcgcacacgcctccttgccagtcctctgcaccgcctcccaactcagcagccggcagcaaacgcgctcaagctcgcccgccgtcctacgtcgcctccgcaccaagtcgcgtgctccccggcagcctcgccttgcgccgccctctctgcacgctctcagcagcccgacgcgcagacctccactgctcgcaatctgatccggagctcgagcagggtctcctgaaggcggcatgtcttgggacctagacgatgacggctgggagggtacgaggactccttccttctcccttgcccgacgcgtagccctcgagagatcgagctgacgcgcgctgtcccttccgtggtctgaatcctcccgactgtttctggcccccgacgacaacagacatgcccgtggtccgctctgaacccaactcgatgggtctcgatgaggaggaccagaagaagtgcggcgcgcgatctctacaccctcggctattccgtccatggaagctcagcgctgacaagagccggctcgcatgcaccctcgcttcgcttcgcccccttgccccttccccccaggtaccactacaaggccccctcaaagggcgagaacgacagcgccggcggtggggggagcagcaacgcgagcggccagaagatggtcgctgaggctgagggcgagggccggacgtttctcggcggcgagacctggcggggcaagatcgaccaggacgagtcagactgtgcgtcgctgctggccggagctgggcagctcgagggctttgagcgcgtccgtagcgcagcctgacagttagctgacgtagactgtacgctcttgcatttccccgggatcagacacccgcctgcggctcgaggaggaccacgacgccgacaagctccactcgcagacgcagtacctcttcgacgcgtcgacctcgatgacacccctctcgcagatgcaagcgaccaagaacctcctgaccgaggcccagcggatcgcctatgtcgggctctgcaagctcgcgaccgaggagatggtcggcgagctgcgtgaggtcaggcaggcgagcgcgggcggcgccgggccgaagaagatgggagtgaggagcaaaggggcggagctcaagagcgaggccgaggagagctgcacggtttggggcctcaagattatggcgcggctctatgcccacatggagctgacgcgtgacggtacgcttgacccgttgtctgcccttcgtcgacgagacgagcacggacctgacgagcccttggctttctcgacggcgtagagcaacggatgatcgagtcgctcgccgaacacggcgtccttgccggcgacctgacgccctcgctcatggcgacgcatacgattgcgaatccagagtacgacccggccgaggctgcgcgggtcgcgcgcgagcgggccgaggcggacgacgaggcgcgggaggaggctgcgcggctcgctgaagaggagcggctcgctgaggaggtgaggctggcggcagaggcgctccgggtcgagatcaacggcggcgaggacgagggcggcaacccgttcgacgacgacagctcggcgtcggcaccggcgcctgtccagaggaggctgccctcgatcaaccctgatccgtcagatctagcctttggccaggcagagtcgcctcctcggtcgtcattgcccttgccggcctccaacacgccgcctgcgtcgccgccgcctccgccaccctactcgatacggtcgacttccacacccaaccccttcggggataacgacgagggcgaagaggccggcgacattggccgtttcgactctgacgaggaggagctccggtcgacgccaaagcgcgccccggccgacctccctccgccagtcgaggagacggaggaaccggcgcccagaattgtcggcacgacgaccgacctcgacggtccgctccggaaggaggacgagaatgcgacgccgctcctccccggcgtcagcacgactgtcaccgccgccgacgaggacatcacgctcgacatccggtggacgatcctctgcgacctgttcctcctcctgattgccgactcggtctacgatgcccggtcccgcgttctgctcgagcgggcggccatcaagctcgcgctgggcacgatcgacgtcgtccggtttgaaaagcgcgtgaccgagtcgctcgagatccaggagggcgtcgagcgcctcaagcaggaggaggtcatcgagggccgggcgcagacgagcaagaagaagcgctacgtcgcgatcggcctcgcgacgctcggcggcggcctcgtcataggtctctcggccggcctcctcgcgcctgtcattggcgccgcgctcggcggcgcgctcacgaccgtcggcatctctggcacggcgggattcctcggcggcgctggcggagcagccgtcattacgacgagcggcgtcggtatcggctcgacgattgcgacccggtcgatggcccgccggacgcgcgtcgtcaagacgtttgagctcaaggcgctgcataaccagaagcgcgtcaacgcgtggatcacgatgccagggtcagtccaccgcgtccttcctacgcgcactgtatcacgacgagaggctgactcgaagaccttcccttgctcgcccagcttcatgaacggcaaggacgacgacgtccggctgcccttctcgacgctcgacccgatcgtcggcgacgtctttacgacgctctgggagcccgagatgatggaggagatgggcaacgcgctcaaaattctgacgaccgaggtcctgagcagcgtcggcacaaccgtcctccaggcgaccgtcatgacggccctcatgagtgcgctgcagtggccgctcagtgcgttcttgaccgcgctcgccttagagtcttgcttaatgttctcgctgacttctagacgcccttttgcagtccttacgaagctgagctacttgattgacaacccgtggtcgaacgcacttgaccggtccaaggcagcaggcctcgtcctcgccgacacgctcctccaccggcatgtcggcgtccgtcccgtctccctcattggcttctcgctcggcgcgcgcgccatcttctacgccctcgccgagctcgcccgggttaaggcgttcggcatcgtccaagacgtctacctctttggcgcgaccgtcaccgcgagcaagcagaagtggctcgacgtccggggcgtcgtcagcggccgctttgtcaatgcctatgcccggagcgactgggtcctcggctacctcttccgggcgacgagcggtggaaacaccgtcgccggtctccgcccgatcgaggacatcccccggctcgaaaacatcgacatcaccgacaagattgccggccatctctcgtaccggccgatgatgccgctcctgctccactcggtcggcctgcccgtcactgccgactactttgacgagccggtgcgtctggctctggttcgtccgacatcttgagcctgactactgacgcaatcactctccgtctcttgcaggaggagcccgagtttgccgaggaccgcatcatcattaccgaggaggaggaggaggctcgtcgggcggccaagaagagctggttcggccggagcaagaaggctaagcccgggtccggactcagctcgccgcagccagccagcagtcgaccgccgtcgatcgacaaggctcgcaagccgggcgaggctccgccaaagtacgatgaggacgctgatgacctcccgccccgtgcctcgctcgaaaagtctggcgcggccgctactggtcacagtaagctccgctcaagtatcgacgagacggaagagcgctggccaagcgcttctccacctctgccaaccgataacagcggtaccgagtcgccctcggctgccctgcccgtgacggccggctttgactttgcggccatctcgcgcgcgctcggcaaggacattgacgtcgacgccctcaaagcgccggcggccgggcctcaggcagccgccctgccagcagccatcgaggtcaagccgccgctcgagcgatccgagtcgacccctccctccgccatcgcctttgacgacccggccagcgcgctctgggccaaatccgacctgccgtgctcgagcccgctcgcaacgtcctccatgcacgatctctctcgcctatctctcgacccgacgccggtcccggccgacgacgaggacgactcgtggtcctcggccgctcacgcggtgccatcgccatcttccccgagctacgacaccaacgcctggggcgccacctcgccctaccgatccgcgtcggcctcgtcgtcggccgccctgccgtcgttctcgagcctgcacaagcctacgcgcggcttctcacaccacctcccgccaccggacgagccggcaatgacctttggcggcagcgatggctcgttcagccgatccaaggaggacgaggtcgacgacccctggaagaagcccctgcctcggcccggtgcaggtggtttcgttgctggcaagggtgtcctcgacaacccttggggctaagacgctcctcaactttatgactaatgacctcaccacgaacactcgctcgccgtagtccatgcttaccaacgcctccacgacagccctagtagagcgacgcgccactcgtccgggcgaagcgccggatgtcaaccccggggaccaacttctgcgacagcgcactgatggcctcctcggtcatcattggcttgccaccgccgagcttgcgcttcttcttcttgaccggcgcgggactgccgggagacctggaaggggatgcagacagagtcagtcacgaggacggagccgtatttgcagcagatggacacacgacgtaaaggtggcgtcggcctgctgaccgacgctctcgcgcagggggttcttcaaacttgagcccatcgccttcgcccgctcgccgttgttctcgacatcgtcgtcgtcgttgtcgtcatcgtcctcgtcagaagagaactgggccttgcgagcgggtgtcccagacttgatcgggctcgagcgcttgacgggactcgagcgcaggactgacttcttgggcgagcgcttcgagggcgaaggctccggagacggcgtcggggagggtgaagcggcggacgctgcgctggcgttgaaggaggagtcggcgtcctcctcgatgtcgtcctccgactcatcctcggcctcctcctcgctctccccttcaaggatctcggtcgtagcgagcgggtcggccgactcgtcggcgtcctcctctgtcgccgcctgcgagttgaaagaggcctgtaagagacaaagcgcgttggagcgtgagccgcaagcctgttttttttctcgcaaaaaggacccgtcacgtacatcggcgtcgctcgactggtcgccgtctggcgcagggatcggctcgttatcgctggcgtccccgctgatgtcggcagccagcggggcctcgaaagggagcttgctcggcgggagcccgagaggaccagccctgagcgtcgcagcggttgcaggtgtcggggaagcgggttcctcgaacgagccgtcccgcacacgaggcgacgacgcggcctgcgccaagattgtactgtcagcgcgtgagatccttgcagactcacggcagctgccactcacgaccgactcgtcttcgtcctcctcgatgggctcacggaagcgctgctgctgcggccgagccttcattgcgctgcgctggacaatgtcgatctgacggtcgcggaggagcacgttttgctcgctctgcaggaaaaggtaacgagaaccgagcaatcagcggaccgcggcttagaacagagtatcagaagaggaacgtacgccgagccgcatgcggtcggcaaaagtctgctccatgtcctgcatctgctgggccatgtcctcggccatctcgtcccgcgtgtcgctctcgatggttgcgcaccggatttcggcctcgagcaactataaaagaggcaggagattgtcagatcgtcccgatgcgtgaccaggcagccgtagagactcacgcggatacggaggtccctaatgacgtcaaagaggtgttcgacgagtgcgtctggctcgtcgtcgtccgactcgaatgcgtcgtcctcgtcgtcggcgagcgggtcggcctcggcttcggcgatggcttcagactcccggagcgaggctgacgatgacgcggcccagatgtcagccgctgagacgagctcgttgagtgagagtaagagaattgaccctgagtgacgaggagctccgcctcgacccgctctcgctcgacttcactcgcccggccgctcggcgtctcgccggcagggccagccatgacaacgatgtccttgtccgcgttcgcaggcgcctgaaagcgcatcatctctggaatggccttccgaacgaaaggcccagcagcgacagccgggctcgtagggatctcgctcgcgcggacgacgcctgcgtagcgctgcgaggccgacatcgtgtttgtctggatctcgcgcgcgacggccgagaacttcatcacgtgcgaattctcgtcaaagccggtgtcgtacgggttgacgtggatcatcatgacctgctcgagcggaagaagggccctgtcagcacgcgagtcgctggaagcgagtcgctggcaagggggcgagcgccacgcaccgcccggccgtcgccggcaaagaagccctgaaacatctcggtcagcttcgagtgccgaaacggtaccatcgccggcttgcgaccctgggcagccttcttttggttggcctggaggacctccatgcactggccgagggccatgagcgatttgttgatcgagccggcctccttgaggcggtcgcctgggaaaggaagatctcaggtcagccttgaaggtgcggcgatggcgactggcagaggacggaccggtgttgccggtgttcttggtccgttcagagccagcgagatcgacgatcgagagccgcgagacctgggtgctcgacgggtccttgaaggggtcatacgcggcatcagcttgatgaccccctcccaagttgatctggagcgtcgactgacctctggcgcgccgccgtggatccggacgaccttgacagtgaagaccgcgtggctccgcgagctcttctcgttcatcctcgtcccccagacctggcgcatctccatgcccttctcgacgacccgctcggcctcggcgaccgaccggacgcggacctcgcgcaggcccgagacgtacttgatcgagagatcagagtcgttcttgagggcgagcggcttgcgcttggatgggtggaggaggtcgtgcagcgacgacgacgggtgcgacgagagcgccgaggccgaggcggtcgagggcaacgtctcgagcaggtcgaaaatctaggccaagggaatgaggttcgagagcgtgtcagcagaatgtcaggtgcacgaccggctcagccagagaggcgcaccttctcgttgtacagctcagcgtagctgacaaacacagcgtactcaaagttgcggtcgaccttgaccttctctccctcctcgaagcgtacctcctgctcgtgcgactcgccgacgaagctggccggcagacagtcctcgtccttgcgtccgacaaactcgacgcgacccgagcggaccggtcggagagagcgggccgagtgtacgtccttgatcgaggcgaagaggagcgcgagcgagcgagggatgatgccccgagcttcggacgtgccctggatcgtgtatctgcaagagtcggtaacgagtcagcgccggactgccgcaggctggttggcgcgtcagacccacgtcttgcccgcgttcgtcacgccgtaagcaaagacgagaccgttttcaccgttgaggacgctctgtttggatgacagtgctagttgtcagcggcagtcgcgcggaatctcagcaagatgctcgccgacataccttgacgagcggcccagccgtctggccaaagaactctgcctggctggtcgatggttcgaatactttggtaaacttgtaggcctgcgactgctttgggttgaaaccggccgaaaagccttggatcgctgaccagtgggggcgggcagcgtcctgaacggaggaggatgcagtcagtcggtcagtcggacgaaacggagaggcgatcgtcgggcaagaacgcacgttaggcgccgtcatgatgacttcggtttcagacgaggtgacgaggtagggctcagactgcgaggcctcgccagcctcgggtaggggccggatgcgaaggaagctctgtgacatcaactggcattgtcagttatggtgtgagcgcagcctctagcgcgagaaccgaccttgatctgctcagcctctcccgacgaagctgacgccttgatgccgtggtcgcccatcagtccgccgccgccgagccgagagagcgacggcccggcaaggccgccaatcttgcgcatgctcgagttggccgcgttgaggaagcggcccttgaggccgccgccgcccaatccacttccactgcctgcggtggaggagagtgacgtggtcgaggttgaggcgaccggattgagaggcttggtaggagctggagaggagacagagaagggagcgcgcgggagggccgagaaggaaggctggccacaaacaggggtttgcgcatcgtgtcagctgtcagtgggctgcagagtgaccagccggctgccgtccggcagttctcatcccgggccaaaggacgcaccatcgtgcgtacttttggcgccgaagcaggcttcgcagccgtcgacgagctcgccgtcgtcctcagcctcgaggcagctgccgacggtgcagaagaggccggagccgcagcagcccctctgctcgagccgaagggcgccctgctcgtcctccctgccgccggcgcaacgctcggccgaccagtcggcgatccgccctttgcggtgctcgcacgagcagcttcacgttccttgcgctcgcggagggcagcctcttgcttggcctggctcgaggccgtccggccggttgttgccggcgcgacggacgagcggaggcgggccgatgatcgcgtctgaggcgtcgttgacccggacgatgtttccgaaactgctggtggaggcggcatgggctgcttgcttgcgatcgcttgccagatggggatgaaggttgagggacaggtcggaggaacgggacgacgcgtcgaagttgatcggcaagacaggcgcgtcccccctaccgctcgacctgcaccctcgtccccggacccctctcgtcgcacattcaagatggcccagaagctcgccagcaagcagtcgcaggcgatctcgctcaagggatcgaccaagatcgtctgcgagttctttgacttctcagtcgtgcgtcccatcactgtgccatcccccttcctgcctccgagctcggccagcttgtcttcgctggcccgcccagggcagacgcagcagccagggacgactgactgaaagacccggtctgctccagaacaatatcctttaccagcgcggcatctacccgacagaagacttcaagatggtcaagaagtgagcagctcctcgtccttctcagcctttccttgcgcccgcgcagccgtccgccgacccggcttcgcagccctgctctggcgtctcctggaagctgagctgacctcgtctcccatcatcgtccgcaggtacggcctgccgatgctgacatcgacggacgacagcgtcaagtcgtacctcaagtcgatcaccgaccaggtccagtgtgcgtcctcgcagcctctcctccgactcgccagcctcgctgtcttgacctgcgcctcgtcgctgcctgtcccctggcaggtttacggcacatgccctccatcacgcacaggctgataacgactgcttgctcccctacagcatggctcatgacgggccagatctcacgcctcgtcctcgccatcatcagcaaggacacgcgtgagacgctcgaacgctggcagtttgacgtcacgatggacggcgaggaggccgggtgcgtcgccctttctctgatgaagctctctccagtacgcgggctgatcacactggttggattgactgagcagggctccaacgccaccacagggtgaggcgccgtcaccagcagcagcaccgacagcaccggcagcgagcggcaagaagcccaagcctaaaactgagaaggaggttcaggccgagattcgcgagattatgaagcagatcacgtcgtcggtcacgttcctgccgatgctcgacgagccgtgtgcgtcctgttcttcttgttcttctgcgcctgcgcctgcgggtctagcgttgcgccaggcagacactgacctgctccgcaacttccttcctcttctgtccccgcaggcaccttcaatatccttgcatacacgtcgacgtccgacgccgccggcgacgacgcgcccgttcccgagcagtgggccccgtctgacgcccacttgattgacccgtccaaggtcgagcaggtacggctccggtcgttctcgacaaacgtccacaagctcgaggccctcgtcgcgtacaagctcgactagacctgcgactgtcgaaggaccttctgtcaatgactggcatcccggaagagtgtcttcggattgaggagcaggatgagcagcgtcggagaaagcgctacaggaaccagattggagccgccgccgtgcgactaagtatgtgggcgaggaggcgaggagaatgcagtccgtgtgtaaatgaggtgggggatccgagaagaagagagagcccgggatctaagcgagggcaaggagcacccaagcagccgcaccagcaacacccgccagacccgccgccttgacgctccgctcgcccgcgctccccggcgcctgggcgttcgagtttgccgagccacgcgagggcggggccgtcgtcgacgccgccgtcgttgagggcgcgaagtacgactgctggggcgcaccggtcgtcactggccggagcgtgttggcaccggtcgtcgtggcccgacgcgatgtcgtgtcggtgttggccgcagggggggcggcaacgacggcaatgttgcaggccgttccggccgctgagtgcagagggcagggcctcggtcagccgagcgccagatgaccaggaagacgacgaagaaagaggaacgcactctgccagagcaaagcaatctgcgcgaggttggccgacgtccagtagccctcggcgttcgtgttgaggcaggtgttgcacgtgctgccgtaggcaaagttcgtgcccgtgcagatgcacgtgtcggtcgccgagcaggcctgtagacggtcaagacgaagcgtcaagacgggggtcctcaggctaggggagaagaggaagcacgcacggcgaacgcattgagggccggagcgcagtcggtcgtgcagacagcggtgccgacggcagtcacccagctagagtaggccgcgtagccagcagtcgcaccagcagcgacggccgacgatgtccgcgactgctcaaggaagttgggactgtcagctctggcttaatcgtcggtggtggagcagaaagggcgacgcacagcaggggagacggtcgagctcgagcggatgctcgatgaggcagagctcaccgacggcaccgcaccgccggcagcctggttaaggacgggaacggcgccgagatagccctcgttcacgcaggccagggcgtaggctggcgagtgggcacgaagggtggcaggaggaggtcagtccgagcccgccaaggctcagggcgaacgagcggtggtggcgcactctggaagccgttcgtgacggttgcgctctgggtggtcgtcgcgctctcgagcaggcagttcatgcacgtcaccgtctgggccgaggcggcacatgcgcacgagtcctccgtgcaggtctgccgtcgcaaggggattggtcgagcagcgcggtccatcagcttcgcgtcgcgcgcgcgtgcgcggtgatagaagggccgacaagactcgggacggaccgtcgaggcagtgatcatgggcgcgcatcgagctgtgcagagagcagacaccgaggcgaggacagaaacgtaggagacgggcccgttggcgagggccgtcagggcaaccgtctcagcttgacgcttggcagggccggctgccgagtgcgcgagcacgacggcgggcgcgagggcagagaggagcagggctgaaagttgctgggcgtctcagcgaggaggtatagcacgagaaggggctggctggcaagaatacgtaccagaagcgacaaggtggaccatcctggacgagggtgcgatagaggaagggtgcgaggtgacaggcaaggaaggggggggggggtgctcaagccacacccggccgcccggttgttttcccgcgcgcagccgtcccgcgacacggcagcatcttaggatcgactcgcagcggagcaaggtctttcaggaggcgggcagtcgcatgcataagagtgtcgttcgaggtcgtcaaagaagggtcgtggtctgacaaggtagacgaggcggaaggtagacgaggcggaggtcggtgctgcgtcgagactggggcgccagctcggacgcacgcgcgacggccgacgaacgatggccagacgcaggggcagccggttggcgggtgcgctcttaggcagacgtcgatagagatcgaggtgggctgcggcaggtcgcgacgggcctgcagaagggtgaaatgaagctcgccgccctcacttgatggtcgtcgccttcccgcggatctcaaggtactgttggtcggcgccgcgaggctgagcgtaaaagagcaagaggatgtcagccttgagtctatggaagcagctaagggggccaatcaggacggaccagcgtcttgagcacctcgtagacctcgcgcgagtggtactggaggccggtgttagggtcgcggtaaggcgcctcgaggccggtgatatcgcaatacttcttgggcggcagaagcgagggtggtgggtgaagagagaagtctgagagagcatgggacgacagagtgcgccagcgccacagtcagcagccagaacatccagtgtcaggccgagagcagcgcaaggacatacagccaaactgctcgccccgctcgccattctcgagcaccctcctcggcgctcgctcgcgctcggccgtcaggatctgctttgtgttcttggcccggggcttgccgtcctttttggcctgccaggccggcgacttgaacggccgagggacgtagaagtacgagagctcgtcgaggatagtctgcgcgccgggtagccaagtttatcagctcacctatccgaagagaccacttgacagtcagctaggacgcacgtagttgccaggtgctggtgtgccgacgagcgagccatccacgccgccggccggtgtcgtcaggcccgacgctcccaccgacgtcttgcgcgacgaggccgctgtcttggacgttttcgacttgccctttggagccctgcagaggcaagcagcggtaacggtcagcagcctcgctctagagctcatgagggcacccattatcttacatgattgagcgataggcgagagagcgggcagatggcgagatgtggtcgggagggagcgagctcggcttgcctgcgtcgcgacctcatctcgctcctgaccatcagctcgaccccgcctcgccctccgccgcaacaatggactcggccgagacatactatccgccaccggccgactggaactttgccgcgcccaccgttctgtccgagtgggacgcccggtcagagccgacggcgagcccgctcggcgaggctaacttcctgcgctcggccgaatggtgggtcgcctcgagctgcgacgggaggagacttgggctgacagctgtgctcctcctcacaggagtcctgatgggacggcgatcttgacgacggccgaggacaggaccgtccgaatttttgacctgtaggttccattggtcgaactgtactccgccacagggactgatcctccctccttgctctaacgtcgcccagcccctgggagaccctcactccgctcctcacgccctcgtacgaaacgaggctgcaggcgccgctctactcggccctctggcacccctacgcccaccgggccgatccagcgacgtggtgtttcctccaggcgtgcgactcgatgccggtcaagctgctgaacgcagcgacgggcgaagtgcggcctctctcagtcagagccacaggcctggacgccagctgacatggcggctttgtgctcgctacccatccagctgcagggaagctatgccatcatcgaccatcaggagcgctttgtcgccccgcacgccatggccttcaccccgtcgctcgcgcagtacgtccccgctgcggcacattctggaacgcatctgcgtcaacctgactcccttttctcccgcctgatctccagcctctactgcggtttcctcgaggcgatcgaagtcttcaccttagccgcgcccggctcgcaaggcgaacggatcaagacgacctcgtcaaaggcctcgcggtcgggccagaaggggctcatcgcggcgctcgccgtttgccggcacggcagcgggacctacgtcgctgggagctatgcgggatcggtcgtcgtgtacgacaaagcgcacaagcgggtctgcgcactgaagggcgtcgtaggcaggggcgtcacccaggtaggtcgacgatctcttcccatatccgcttgcctgcgtcaagctttgacgactgacgacgtcttcctgctctaatcggcagatcgagtttcacccggtcttccctcacatcgtctacgtcgcctcgcggcgatcgccccatctcgtccaaaccttctcgctcctcgccccgcgccggcctctcgccaacttcccgcgggatgccaccgcaggcggccctcagcagcggggctcaaaccagcgcggtcggttcagcatcgacaggtgggggcgatacctcgttgccggggacgaggacggtcgggtcggcttctacgacgtctcggctgatggcgacctcgacggcgggatcgaacctcgaccgaagagcgagccaatccctgagaagtggccgggctacgtgctccaagctggcaaaggtgcgttgccggccggcctccgtctgctgccagcctgatctcacatcgcttgctaccttgctttctgcagacgccatctcgacggcgatcgtccaccccttcctgccaattctcgccactgtctccggcagccgacacgaggcgcccctttcatcgagctcgtcatcttcgtcatcctccgaaagcgaaaccgacgacgagcggaccgaacctgcagttattgtcgttgacagcgcgccggcaaagcccttgcacactgctcgtcgacgactcccaaggccgaccgaggcaaagctctgcatctggtcgtttgcagcaccgccggccggcgcggctctgtccgccgaagaggcgacggccgctcaggctcagccggcgcatgagatgcctgggtcgggcatcgcgggagaagatgaagaggaggtggctatgaacgacgcgatggcatgagacatcgctcgaaggtgtcatcaatcttcctttaaggcgctcctctcaggcgcaaagcagcacctctgctcagtctcgtcctcgcttcgtagcgtttgggcggccttgcgcggtggccgtcgaagccagccgggacgagataggccgcaaatgcgcgagcgccgttggagtgcggtgatcgcgacggggcggccgtaagaggggttgcactcgaaaagggacgcctcggtgatccgtagcctttgataggatgcgtggggcggtgggcgccgataactcggagcctggcctgcgccagcggtgagctctgctcgaccctgctcgatctgcctcctcatccagctaaacgctccgcgcgcgctgtgacgttgacggccgaattgggctcgactatacctcgacgaggtaaccctggacgatgagccgctcgacgtcgccccttcggacgaggaagcgctggccgagccgaaagtcgatgacgccgcgctcggtccagaccatgccgcagtcgcggacgaccttgacggcgacaaagaggtcctttggcggcttctcgagcccgacgagcccgccagacgagaggtcgaggacgtcgatgaactcctgcttgtacgtcaggacgaggtcgttgtacccgcggagaaagtcgacctcgtgcggcgagagtttcgctcgcgtgtcggcgtcgttgagtacgtgggcgagcgcgccgccgccctgccagaagagcttgccgagccggtcgagccgatgccggtggtaagcgagcaggcagcgcttgtttcgtcgcgtcgagaggtgctggaccgtcagattggctatcagcccgcggttctgcgagaggttgggtccttggccgccgttcgtctgcgaggccgaggcgagacgcttgatctcgtcgtagaggaggcgcgtttcaaggcagacctgccggacgagcgacgagttgtacttctggagcgtgtcggtcgctgagggggcggcggggcaaagagtcagctactggcagctgcaacgagctgaacattcggtccaggataaaggatggaccggtcgaccgacgagcgtcgacgataagcttgagtgcgtcgtctccgaacatggctgcgagtgtcagactgagggagggaagtgaggctgtcgcgtcaggagtgcagctgggctggcgcgtcgtctaggatgcgcgactgaccctctagctttcagccgacgtgagactcccgaaacaaagtttgaacgtcgggggctgagccgatgggcttggcaactattggaagctggggggagaagatcgtcgagtcgtcgtcgtcgtttaaggacgacgcctctggacgcgacgcgaagccgccagggccgggacgagaagcccgacttggctttacgtaatgattagggttaagccggaagtggagggtggcgccgtcagtcgacctcgtcaccatctcgtcgaccccccaaccctcatccacctctatactcgaacagccatggccatcttcaccatcatcggcggcggcggaaaggtcgccctcaagttcaccaagctcagcaccgacgctggccacaccgtccattcggtcgtccggaacgacggccacgacgccgagatcaagtcggccggcggaagtgcgtccctccctttggtcagccagcgacgcgtaggctaccctctgacgcttctctcgcgcaatgacagaacccatcctctggtcgctcgaggacgactctgtcgccgacctctcgcaccacctgaccaagacccagaccgaggccgtcatcttcgccgccggcgccggaggtggcgatcctgccaggacacgcaaggtcgattacgagggcgcgctcaaggtcgccgacgcggttgaacaggccgggctcaagaggctgctgatgatctcggcggcggacttgcgcgatcgctctcagccaccgccggagcactacaacgacgcggacattgcgctctccgagtgggtccctcgctccgacgcttgacttgcaaaaggtcgtccgctgacacctttaccgccggccccagccgcatgtggaaggcgatccccgactacatgaaggcaaagtacgaggccgacctcaacctcctcgaccgggccgccagaaagacgctctcgccgctgatcctccggccaggaggcctcaccgacgacgccccgacgcatgccgtccagctcggctcgcctcacctcggccgcgtggcgcgctcggacgtcgcgggcgtggcgcttcggctgctcgagaacccaaaggcgccggcggggctcgtcgtcgatctgatgggaccgtcggaggaggagaagggcgagagctgggaggcggccgtcgaccgcgtctgcaaggaccggaccgtcgtctagatctgtctccctcgtcgttgctgcgctcatccgaaccgcactcactgtatcgatgctttctttcctagaagcgcgtcaatcgcgggaaggcgcggtcattaatcggaggcgggcgaatgctcagcaggccagacgagaggggcagtcatcggtcggggagttacagggaggggagggctggatagtggcagagagaagccatggtgaagagtgcaagagctggggtatcgagcgtgtgtgcggcaaaagagagggcagaccccggcagtggggcagaagagggcgggtcgtgatggcttccaagcgttcagtggaaagagtccgaagagagatgacaagacagatcaagcagtgaccttctgctcaatggaaggagagatcgcgagggtcagcaccgataatacgaccgaaggggtagagagcgtgctcgggcgacagacggaccttgatgtcggcttcgtacttcttctcgatggacttgcgctggatcttctgcgcggccgtgaccatgccgctctcgggcgtccactcgtcaaacgtcaggacgatcgcgccaagcgcctccatcggcgcgaggccggccgccttgccggtcgcgttgatctgggcgaggacggctgatttggccttgttgtcggacgcgaggtgcgagaggtcgcccgtgccgaagccctgctccttggcccacttggcaaagttagcctcgtgctagaggatcgcagcgggagtgtcagcctcgtctgggtcatgttgaaggacagattgtaagacaaacaggcagcatgactgctatcgggtgcttgaaatcggggttggcgacgacgcagaggttgccgacgagcggcgccgacttgtagaccgactcgagcttctctgtgggtccgaaaacggggggataacgatgtcaggagaggtcatggcgcctgaagatgaagtgaaacgtaccgagggcaatgtactcgccgccggccagcttgacgaggttcttgatgcgctggtaaatcaatgaaaggcaatccgcggcgtcagttttcagtcgagaggtcagtaaggcaaggccaggacgaacgtcgatgatggacatggtgccatcagcgttgaattgcgcgacgtctcccgtcttgaaccagccgtccgccgtgaaggcctccttgtcgaggtcaggccgcttgaagtagcccttgaagagggacggtccgcggcagagaatctcgccctgcgggagccggttggtgctgaggtagccggcgtcggggacgtcgacgagcttgacctccatctgcagcggcgcgggcgagtcagatgctgtgatgggcgacggggaagggaggagagggactgaccgacgggaccgggacgcccgacgggccgagcgaccagaagtccggcggcaggatgcagcacatgccgaccgtctcggtcaggccgtagccctggagtgtcgtcacgagcgccgtcgagaggaattcctgcgtgctccggctcagggcggcgccgccgctgaggacgtagcgcagccggccgcccgtttgagccttaaccttgttaaagacgacggcgtcggcgatgttggcgacgcccggcaggccgtacttcttggcggcgagcttcgagttgtaggcgagcttgaagacgccgcgggtgacggcgccggccgacgagaccttgaggttaacgcccttgcggatcgtctcccactgtggacgggggagagaaggtggtcagtctacagcttgcgtgctcggaagggaagctcagcacgcacgacggcggggacaccagtcatgatggtcggcttgagctcggcaatgtcgccccggcagttgcggacgctcgcgtccgtcagcgtcttgacgcggccgtagccgatcggcatgccaacaaacatccacgagacctcgacgacgagctcgagaatgtgggcgagggggctgagcgagggacaaaatcagccttgtgagccaagcaatcgttacggcaacggaggagaacgcacaggtacgcaaggtagacgtcctgctcgttgaagatctcgtagagcaggtggtagacggcgccggccgacgaaaggaggttgccgtgcgtgaggatgacgcccttcggcgtgccagtcgagccctaaggaggatgagtcgctcgtcagcaggctgagcatggaccgacggctagggttcgcatgacgacgcaccgaggtgtacatgacgcagcacgtgtcctcgcgcttcggcgggacgaccttgacctcgctctgagcccggccaagcgcctcgagctcctggatcgtgagcagcttgatgcccttgcggacagcctggagctgggcgacgatgtcgcccttcggctcgccgtcgtagatgattgtgttgagcttggggcactcgccgaggaccttgatgagcgtcggcaggagctcggcgttggtgtacatcgccggcgactcggtctcctgaagcgcgtgctggaggccggcgacgccgagcgtgtcgtaacaagtcgagatcggaatcgagacggatgcacaggctgcgagaaggcgagggtggcggtcagcgtcacaaccggcaggaaggcagtcacagggtgggttcgcacactgagccatgagctgccaatgcaggctaagaagcagaaggggccgacagggggtcagggaggtctgaacgcccggaggcaaggccgacacgcgacggacctggtctggccgtagatggtgagcatgctagcctctgcctcggtccgcttgccaaagccgagctgccagagaccggtgccgaggaggccgaccttctcggcaaactgcttgtacgtgatccctgcggatagaggcgagcgaggcacgtgtcagccggctcacgagggacggggagggggctcctccgaccggcccgaatcccaggccggtccgtgcaaacagagagagggcgggtagagggacggacacttgtaggcgctcagctggaagtacttccactccttctgctccttcgtctcgacgccgtcgaccttcttgatcacctccttggtctcgatcacaatgtcggtgatggtccgcgtgccaaacgcctgcttgtcgggccgcgtccgggcagcatactggacgacatcgtacgtcgtgtcgagcccggcgagcggctctgcgagcgagacagacagagcagggagagcgtcagcatcgaggcgaggtgtcgtgtcgccagggccgggcgtcgacgtgctgtggctcgggcatcagagcaggcgagcctctctccgaagcccagcgtccggctccgcccctcttcgtcccgatcacctcgagagattggccaagtgacttctcgagaacaataagatgctcctccaggagccgagttgactctcgctgccccggaaggcaaggcgagggacgggtgaggggacatacgcgtgacgagctccttgacgcagtacgaccggcggacccgcgtctcgcccgccttcttgtcgccgagctcccacgagcccggctcgttgcctttccgaggggccatcgctgtgtgtggtgccgctgagggttggtgtaggtgtgcgagggtgaagggaagggcgtggtcgttggaggaaacgagcgcatcacctcggcctcgccttgatggctcagccccgcgcgggcttgccggggcggcagccaagcctctgccgagcgcaagtcaagaactctcacgctggcacgcgacccgagtctggcctgtgtttgcggaagcaagcgaagagagacaagaagtcccgcatgtcatccgacccttaaagggcgagcgcgaaccgcccgccgcagaagatgcagcacgtcgccgcctcgagcagctcgtccatcagccagggctcggccaggccggcgagtgcgctcacgtccggcttgacgtcctcgtcgtcggtggccagcaggccgtgatcgacgtgcagcgtgacgtggacgtcctcgtccgagtcgtcggcgtccatatcgacgtcggcgacggtcgaagccggcgaggcgggcccggcagcaccgcctgaagacgcggtcattgacgttgctccgacggccgccggaaggggagtggccgcatcgacctccttcttgcccatgtccgcctttccttctggatttgaagggccgagagtcgctggtggcgggcgacgggccggttttgaccgcctgtcgaagggcgacgagggctgaagcattgtcggccgtgcgcagtgcatgcaccggcgcgactgggcgctcgacatgacggcaaacgtgagcgagcagcggtctggcagggcacgaggatcgcgcagcgtcagcgtcgttcgtgtcgttccaaatcagggagcgacgcaccccactcgtgcccgttcgcgcagcaagcgccctcaacgccttcaaagttgatggccgcgccgcatgccggacacatctcgccgacgacgacaatgtcccagggcttgtcgagctccgtctcgtcttcgccgccaggctcgtcaggcaggacctcggacgccgtcatagcgccctcgagcacctcgaggttgacgtagatatcgaggccgagtgcgactgagaggtcaaagatgtggccggtgatggtcgccagggcggctccctcgtagcggtagggcgcttgcggcgatggccgcaacagggacgttagggcgacgtgaatcaggatcgtaagcagtcgcttgtcgtcggctgttccggcacaagcagcgtcagcgcacagagcatagcgtgcgtttgcgagaagcagcagacgcaccgtgcaagacgaggtcctggactcgcgcaacccaggcgaggatgatgacggccgactcgacgaggaggagccggtagatctcgtcctgcagcagcgcaaactcctccttgagtggcccggtgctctcctacagcatggaatggtcaacttcagtatcggcggcagaggaggcctctccgagggcggacgtacggcgaaaaagtcggccatcgccagtcgcttcaagagactacctgcctcgcgcccgccggtcgccgtcgagccccagagatcctcacgcaggcccgaacgaaaccaggctttgacggcgtccgatccttccggccgcttcgtgctcaccgacgcgcgtggcaggtcgagcgggggtggcggaacgagcgcctcatagattggctgtgagagacttcgcagaggcgagcgctcgtctggggcgtagaagggcaggagggccggcaggagagtgacgagcggtgcggccgcgaggtctgatggcaggagatggggtaaatgagcaagacgctggacgagtcgtttgtcagatcagggagcacgcacagtttgtctctcggtcggcaagcgagcggctgatccggtcaagcgtctgtgcgctaaccgcaccggccgtgagggggatctcggcgagtaggagggtcgcatgacgtttgctcggcgtaaagttggacaggtcgtactgccaggtcggcctttgtcacgagcagcagactgtcagcatgcgaagaacacgtcgagcaaagcacgaaggttcagacgtactgctgaacccacgcccagtacccatcgaagcggcagcatccagtgacgcgtgagccagcctggtcgatcggatgctcgacgacttccatcgggagctcggtttcgacaaaaagctcacgggcctgagtcgtcaggtagcgcgagagcggcaggtcgtacgaagcgctggcgaggtcggtcgagtcgtccggcatgctgatgacgtggtgcgagccgtccgagagggagaagcagacggattgagggccgtaccagctgatgcctgcagaacgtcgacgtcgagatgtgagcgagaaattgcgactaagaaggaagacggctgcagaactgaccgctgcaagtcgccaggcgcgagctgtcggcccacgagccgaagcgtttgagccgccagcgcccagagccgtgccacgacccagcctcgctagccgaccctgacgatgccttggccttccgcttcccctccgacaacggcagggccgagacgtgctccacaaaaacctcgcccgatttggtccacgacagcaggccagtcccgagccaggtcaatgccgtcaagggtcgctcgtctgactcggcgaccgactgcggctcgtcgacctcgacgaggcccgaggcaagctgcttgacgacaatgaccttgacgtcgccgatcggtgtgctgtaagcgagtgtagcttggactgcgtcagaagtcgtgcgaagcgagcctgggtcagcccttgatcaaaggccaattggcgcagagcttgcgcaccagagtcgtctgctgcgcgctcccagttggaccaggcgagatgtgagatccagcggtcttcaattcgacctcggccgacgcagaccatgccctccgagatcgaccacctgcgagaggagcagacgtcagtcacctccgcccaacctgcaacaggggagtcacacgcactgccacagcgtgatcaagccgcccttcgccccgagcgcgagcaggctgaggtcacacttggccgccccgtaagagcggttgagcgcctgctgactccaagcgagacctgatccgacaaagccttcagtcagcgctttgactcgaaccggcaggcccgacggcccgaaactcactcgttgtctgcgcgtcgtacacgcgccggacttcccagtcgatctgctcctggagcggctcgatcatcgagagctccttatgcgggtaagctgttgcttcaagcagcttcttcgtgacgttgtcgacctgatggcgaggattgagagtgaaggagccgtcagcaacggcgccttacgcgtctccgccagtgtgcgctcacgcactgccggccacgctcccgtcagcgggtcacgctcgggctcaaagacgaagacttcgctcgacgacgtcaatcctgcgatcaaacagctgttcgaagcgcaacctagccgttcgtcagttctggtgtcgaggcggaggccgactgcgcgacgcaccctccgagcgacgacagcgtcgacggcgaccagcaagccgccttccaggtcacgtccaagctgacgacccgctggccagcgctaaggacacgaaagtctgccgatcacaaggcagaaattgggacccattagtcctcgttcgcccgcaagcggaggacgccgccaggcgaggactcaccgctgctctcggtccgctcccaggcgatcagccggtcaggcaccgcgatcctcgcgagcttcagctcgatcagccgggtatcgtccgccggcgcgggcttcttaacgtcttcgtcgtccatctggctggcgccgccgacaggctggccatcctcggcctctccgagctgcgaggtccggtagaccatggttgtcgaccgcaggcgtgtggccggttcacgcgtcgtcggctttggccgggccgacaggtcaggatccggcgtctgatcgaggcggaagattcatcaggtgagtcagacgagtccaggactgagcaacaagacgccgaacgcggggatgccgacacacaaagatgtagaggtcttgatcgccgacgagcaggagctggccgtcgcgcgactgctggagggtcgacggcgacggcgtccgaggactcgtcgcaaggcgctgagtcgaccagacggacgccatggcggtagctgccggaggaatctccgttaatgcgctggatgggccaagagaccgaggtgatcgtcgaggtcgtcaagagagggatgagctcgcgtcggccaaggacgcgaccgcgcgcgcggccggcgagctgcagcagtcgaggcgcaggcggccccttcgatctcgacgcgagccacaagctccttcaaaatcccaggtcaaggagcacgagcgagtggaaggatggtgcgcctgcttacgatcttttgcgtatgtctcctttgctcgaggactgggggagggcaggcaagccgacgaggaacccggcgctgaccctgttgcgctacgcgcggaaacccgcctgactcgccgccgacgccttccttcgcctccttcccgcaaacggcttcttgtggcagccttcccgtcccgcctcttgcttcccgacgcgatccagctcgacgctgttctcgcctgcggaggccggcaaggtttgactgccgtcaccattcgccctcggccgtcgtcaaaagtcggccttgaaacccgcagctcgcacgcctgggcctcctcgctcttgagctctttaacaacatctatcggtgagcctgctttgccagtcagcctgataggcgctcgaggcgagggtcgcgagctccctgctgacagaccgtaatcatcagcagaagatgagcacaaattcgatggcggatgcggctgtagatgcgccgacaggtcgccaaggacgtcgtgcgtaacctccgcccgcccacatgccgcaacacgctcgttgccctccgagtcgcctcagtcgtcgaggtcagcaagcccagaatgacctgatgtgccctctttatatcccctcttgccgccccgacgtctgtccccttcctgccacattgtctgttccgccagagcgcaccatgcgccctcctcccgaccatcgcacatctcatgtcctttgatgacccgtagaaaccgtcatgttacgccggctcactgagggcagtcgaccagtcgatcggccggcgtcggagcgggtcgtcgggtgcgagccggccagcgaagtcggcgaggctcgtcaaatggcgcatcgttggccggccgtgtgggcagttctgcgcgtagcggcgcgaggattgggtcagttgagtgcagaggagaacgacatcaggcggcgctcacccagggctgatcgacgaggcccatgttgcgaaccacctgcaacgggccgtcgtcagcaagtggcaatgacggcctaccgtctcggtagcggcgtaccttggtcatctgcggcttggtcagaggccgaccgaccatgacgctcttgcggcaagcgcgcatcgcaaacattgcacgcgccttcgagcagcggaccatctggcccgagggctggtttttcatcaggtgaagaagctcctcaagatctgttgggccatgccgatccaccgtcagcaaggttccgcgcaaacagaggggagcttggcgcaccagagaagtcaaagacggtctctttgctgactggctgagcgcgcagagtgacgaccgtccggccgagctcgtcgtcctcggcctcgggcgcgtcttcgatggcgacctcgaagccgttcttcttgaggacgtccaagttgtcttgaacgagctcgacgtcgacggccgagagctcgagtacgcgaggtctgccgggtggtgggacgtcagccgtcgaagccgtccaggcgtcttctgcgcaagctgcacgtactggatgaggccctgcgagaggatacgcgtctcattttggagcgtctcaaagttgtacttttcgtcgctggcgtgctgatcgatgatgaaaaggtcatcaccggccgcggcccgcttccgggcgatgatgaagcccatgttgaactggccgagcggctccatcgtcgcaaagtcggccttgacaatcgtccgggtgagctcgcgctcggcgacgtcagccggtgcgctgatgctggcccgttcgcctagaatcgggtcgccatcgccagtcgcggctactgccggtgcaagcagtggtacgggtcgcgaccaagcggagcgatagcagccgatgatctcggccgagtcgatgtgaatcgtccgagtcttgcgcggccttggggcgacacgctcggctgaagccggtcgaggtcgatccggaaccggcgcagacggcagccccgacaggcttgaggccagaacctcgccttcgccctcttcgtctgacgacgtgtctagcgtgagccccaacggccgcttcccggctgctctcgcacttgaggacaacggcggctcgtccgcaatttcttcctcgccttcgaccttgtctagaggtgccgcgcttgccggccggctgattggcgtacctcggcggccgcgcataatactctgcaagtcgaccttgaatacggcgaccgggttcgaacgttcgcgctgcttgccttgcgcgactgggctcagcggttgcgatgtcggtcggcggtacgaggaagatggccgaatcggctgcgattcttggtcctggtcatacaaggggacgggaccttcgttgtcgctttctatcgactggctggtcgaggcgacagctggagtcgcctgtggcgagcttgatgtacggcgcggagatccggacggcgacgagctcgaaaacagagtccgagcgggtgccggcggcggcgacgagaagagcgcgtcagacgaacactctcgcccgcgcgtggccccgacgacggctgcgtctttatcatcaaagacaggctcttcctcgtcgagctcgagctcgaccggtgtcagacgaaagccagcgccgagcttcgactgctttaatgactgaaggaggtctggcacgctggtcgatgtgctcgcggaaggagcgctgacgagaccaccggaggatgagccgccaaacttggcgagcaggttagcctgttgtcacgggcagcagggctgacgtgatcagcgagagcgccctctcttgcgccaggcgatcgtcgagacgcacccggatgccctccaggatcgagttctcgtcgtgaaagaagatggtccgcttgtcaggcgagacgttgacgtcgaaagcatctgtcgtatgattagagtggtcagcgtgggtgcatgccgaatgaatggcacaaggaaaccaaccgggcgggatgaagaggttgaggacgacgactggcgtgtgcgctggattgagcgaccgccaagcgtcattcacagccttctgaatctgtaggccggatcgagcgtcaatgatgaagcgacgcaaatgggcccgagcggctcactgaccttgctgggcgtgaacggccgggcgttgatagagtagaactgcctgtctgcggacgatcgagccggctgcgcaggagaagagatgacgccgtgcacacggcagactcgcggactgcggttgcaagtgcaggcgcaaccatagtcagcccttctgcgagaacgacgaggacaaggcggagcgcgacgcacgagttgcttccggacgcctcgccttcggccgcaggtggcagctcgagctcgaagtcgatctcaaccaagccttcgcctgccttcggcccccatattgaggtaagagcggctcgtagattgctgctgctgtcggtcttcaggtgcacggtcttcttgctggcatgggagccgggtcggctgagttagcaatgtcggcggccgaggcgagtgctttgctacctttaaggagctctcgtcgacgcacccgcccttcaagccggtcgaggtgacattccagcggacgcccttgccctttggacggatagtccctgtcccgccgtcgagatgcgcaacgagcgcgtacccttgcaagagcgtgatcgcctttgcaaactcgcgcttggcgttcttctgcaagtcggccagtcggacgggcgtcggtgcaaagaggcccaagagtgtgatggtcgtgcctctctgcgagaggctgagagtcagtgcaagctgctggaagtgggcttggacgacgacgcaccggcctcgcaaccttctcgtcatcgttggcgacgttgccgcccttgtcgaagcggatccgggtgccaacgggcgcctcctcggccgtggccgtgacaacctcgacctcgtcgcagagtgcgcagagcgacgaaagagcctcgccgcggaagccgagcgtgcggaccgaggtcaggtcggcgaaggacgcgagcttcgacgtgtggtgcttgagcgctgcgctcgagccgggtcgagggtcagcttcatcacaatgacctcggtagtagcgcgggcgagaaccagacgcaccaatgctgacatagtccttcttcgggatcccgcagccgtcgtcgacaacttcgatgctcgcgaggccatactccttcagccggacctcgaccgacgatgcgtgcgcgtcgagcgcgttatcgacgagctccttaagcgccgtctggagcgaggtgacgacctgacccgacgtcaggcggtggaccgacgtgctatcgatggcctggatcgacatcgggcctggctgagaaagaactagacagggccggcggtagatgcgaggagcagtctggtcgaggtcagaggaagccgacgacgcgacggggcagagcgcagctgtcggcgaccataggcgacctcgagacggtcatgacctcggccgcctccttcaaggctcagtagcagcagccctcctcccacatcgcagccctgctcgacggagcagctagctgtccgcaccggctggcccggtaccactcgcctcacgcacgatggcgcaagcctcgttcaacgccgacgactcgctgctcggctcgtcgacgtccctcctgtcgctcccgatcctctacccgccctcggcctcgacgctgccgttcccagctcggcatcatcctcgcttgacgccgccggcgatcgacccggacctgccgcccttcgactttgacgacacgcactcgctcctcaactcaccgaacgagcactcgcgctcgatcctgcccggcgcgctcgccgacgacgacgagggcgagcaggactcggacgccggcctcgacgacgacgagtttcgggccaaaatggatcgcgacatcctcggcgaggagggcgagatgagtcgtgaggaggaaaaggttgcacggcgggcgcgggagctcggcagccgcatcacggctaggttggacgaagttcacctcggcgacctgcgataccgtacgtccaacgtttgcgactatcgactgcggtcgacgtgctgactgatggccttccttttctgccagtgtccggcgcagatgaggtcctgccgcatgcgtcagaccagcttcagccgccttcgcgcaagacgctcctccgtctcctccggtcgctcgagcacgacgagtggcgatacccgccagaagcgcttgccgccggccggcgggcgtatgccgactttgtcccctacgagtggcttgcacgtcgaccagggggcaaggctgcgaggaagatgcgtcctggcagagacgccggcggcgagcggagggccgaagcgggcggcatggacgtcgactcggcggctgtggtacgagagtgagcgggaagaggcagactgtgtcgtgcgccatgcatggatcctcccccgcacatttgttgagcgactcaccttcggcaggcgttttgccagcgcatgtgcagctcctcgcagcgcaagtctcgccctgctcggagcacggccgccgcacagtcgcccctgctgctgtgaccacgattccagtacgtgctgcctacagctgctgtctgtcgatgccagtcagtgcgctgtgatggcgccggacgcaagtgccggtcgtttgtacgcatgcctctgccggcggctctcgtctctcggcgcgcaggcgaccggccgacccttaccaagctgccacccaccatctcgcatccctccctcgccccgatgcagctcccagccggcctctgtgcgattcttcttcttcggagcgtacgagcctttggctggagggcggcctggggagacgcgtccaaggcggcggaggctgagacggtcacagggggtgcagggccggcactcctaacgacggtcgactcaaccggccgagacggtgcgcctctgttgccttaggagctcctctttgatcgtcgtctagacgctgacagtgttggcttactctcgcagcgccgatgctcgaccagatgctctcttcccttcgtgcctcgccggtcggtgccgaatcctccggcgacgtcttctcctcgctccgtacgttctcggctaggctcggagccgcccttgcggccagctgatggtcagcactttctacctcggcagacctgctcaagtcgggacggcagcagaccgactgcctgcagcgagcggcggagtcgctgcccgtccgctgcaagggtgacgacccccaggcgcagcgggacctcgagcgcatgaacagtgcgtctggccccgaatctgatccctcgcgagggtcactaacctcatgatcagtcgccatcgctctcacgctttgcgacctgtcgactgccggcctgtccgcgccactcgaatgtacgtcgcagcaccacccgccggcgtcgactcatttggcctgcgtccagtacgtccgaagcgaggcccactcgggatgtgcagccgctgatgccgtctttactgctgagtagggcactcagcaggagcacgcagtactggagcacgtactctggctaccttcgcgagacgagtgagtcccgtgtgtgtcctgctggccaatacctggactgaccagctgttggccttcagacctcgtctgcctggccttccagcaggtgcacgccgagagtgcgactttcccagcggcagcgcatactgcgatctgcgacctcttgctaacttcttctcatccaggtgtcgcgcaggatgtataccgtaacgcaactatcgagaagcttgcccttctgcgtgtccttcgagaggaagacgagcgacggcaggcattcgatgagcaacttgcctcaactctgaacgagctcaaggtcgatctctcggtgcgctcttaatggtagcgtgtcggtgcagtcgacgcgtgggctgagcgaccgcttctctgatcaggacctcgcctcgctcaaggattcactcgcagccacggccgacgctatgattcaggcgacgagcgccgaggccgtcgatcagctgtcaaaggtcgtcgcagcaggtctgcaggtcgagattgagtcgcacgtctttccgcgcttcgaggctggcgtcgacgacaccttgacgacgctgcagcgctcgctcgacgacctgattcagacggtatgtgccctctttctccttgcattgcaactgggctacagcagaactgaccatctggattgcgcacagactgccagtgaggctgctgtccgctcgagagacctcgactcagcctctctcgcgctcttccaccggcttcgacaatcggccgagatcaccgccgagacgcttacgggcgcgattgacagcgctcacagtggcgtcgcgactcttggccgtgcagtccaactggcggctgcggtaagtaagtccatcatcgactcagcagcccgcctagctgaccgagggtttcgtcctgcaggatctcgagacgactggcgggctgtctcgggacatcttcctcgatctgacgcggtcgcatcagctcgccgcagcggccgaggcaaatcagaccttctccgccctcgtcatactactcactgacatgatcggacccccggccccaggctgcctcgcagcgcactctctcgcacgcggcgctgctttcggcccacatgcacaacttgacggccctcatcgccgaccagaccgaggtcgtctcggacgccatggcccgtctcggtcggtcgggtgcctcatgggtccagcagtgcacggtcgactgcgtcctgcgtgtcttccgcgggctcgggttttcgttcgggaccgagcagacgcggctcgaggcgctgcggttcgtcgtcggcctcgttgtcacggtcctcggccacgtcttgcaactctttgtcgtgcgtggccaaactgcagctgcttgcgacaacgcccgtcatcagactgacccatccggcgctcgcctccaggctgctggaatctgcctcgtcgcctggtcgacccgccggatccgtaagttggcgtccaggctgcatgagtcagcggcgtgtgtcgacttgccagacccgccgccttcagctgcgacgccaccgccagtcagcgtcaagcaagagagtcgggtccgacgtgcggcgtccaccgaacctcaggcgtcgccgccgtcgctgctgagcgcgcatgcacggccaggcagtccgacgcggccttccaacgagcctcgcataggcgcctcggccctccggatgacgccactcgtcgcaccgccgactgccattaccagcaaacgtcagccggaatgcgacattgccgagcgcatgcgtcctccggtcgaccgcagggtgcgagcggccagcgctccgctttgatcgccgtcagccggccccgctctaagtccatgtcttgtccgctcccgtcacccccttcgctacagtcaatgtcacatgtcgatccgaagaccggaaggcttcctcgtgcgagatagagagggagaggggcgtcgagggtcgcaagcgtgccgagcgcatttactcttcgtcggaccgggcggcggcagcaggctcctcgtccgagtcgacatcgccgagcgcgtcgagggcgccgacgaggtccatctcttgccccgagccctgctgagcggccagtcgtgcgcctgaggggcgttgcgcaggagtgcatgaaggagtgagtcagcgcgtgtgcctcttatgaagagcagccagcccgctgtactcctgacctccgagcggcgctcttggacaggaacggtggtaaccagtaagctgtacgcacggatgatgttcctgattgcgtcgtccgtttgcggccggagcttctggttgaccctgtcgaggtcacgcttgaggtcccagtttggccgcttgggcgcaatgttcagcaggttctggacagaaagaaggcgtcacggcgagcaaacgggtcagaagccggcttgaaggcccgtcctggccttcgaagggacgggagggaggcgacgactcacgagctcctcctcccggcgggcctcgtcctcggcgaggatctgcttggcaacgccctggacctggccctcgaccgtctctggcaggtcagactgcgagaactgctcgaagggcgagagcacagaaggccacagccagcgtcagtcgtcggtctttgcgagctcctcccccatcagggtcgacctgcgcggacgcgagcgcaagagggccgcaccttcttcgcgttgcgcgtctcgttgtcgaagttcctcggcttgatcttgatcggtctacgcaaacgaacagataggcgtcagtttctggctcggcctctctttgacctcaagactgtcaagactggacatacccatccgagccctcgccggcctcgcccgcgcgccgcttccggagcgcctcgagccgctccttgcgcgactgagaggcttcagcgagcgacatgccgccgatggaagttgtcgaggtaagctggagggtggagctgggagcgactgtttgtgctgtccttctgcgtcagggcttcttgagtgacaggacagggaaaggaaggagggcgagggatgacgggtcgaggtcaaggcaggcgtgaggctcaagctcgtccgtcgtcctcctccgccggcgccctctcgacatccatctcggccctctccaatcggccacagactgctctagagacccgtccaagatgccttccgagtatgtcctgctctctcagagcccctcgtgcttcgaacggcgctgatcggtcatggtttgcctcatcggaccgcctcgctccagcctcgcctactggctcgtctcgacacccctgatcgaccacgacccctcgcggacgctgaccgacattaagccgcaaatcgaggagctcgtcgccgactctggtcggggtctggcatcgctcgagatcccggcgctcaaggtgcggaagcgtcgccgccgagcctgggtccctcaatctgtgctgatgcgctcctcgccgcctccctgtcatctcgcgctcgtcccgacaaccgacctgatcgctgggcttcgatgctcttcgctctcggaccactcagtcgggcacgctcaacaccctcctcaccctttccgagagcctgccgaaaacagactcgttcttcacgacaaccgtctcgaagctgctcgacacgctgcggacgctcctcggcgacgacgcagccaagctcgaggcccacacgcgcatcaatgaccggccgctcgaggagtacctgttcccgccgggcggtcagggaggctggaagtgggaccgccggcggtggtcgtccgacggcaaggttgtcgaggtcgtcgagagccttaacaaggttggtccttcggagtggcacctgcgcggcccagatctgaagggcgcagcctgaacaagaggagactgactgacaatccctcttccttcgctgcctctcgcaggagctgacctcgatcgacaacatccagaaatcacgcctgcagtcgtacaacctggccaagggccacctcacctcgctccagcgcaagatgacgtgcgtcgccgccggcctcttccttgccgcgccgtctctcgctgacgttgtcaccaccgacgattcttcagcggaaacctctcgaccaagtcgttgaccgagatcgtcaagccgtcagacgtcaagacgggcgactcagagttcctcgagacgatctttgtcgctgtaccaacgtgcgctgcttgccccgtcttctcgtcacgcacacgactgacgtgacctcctgcaattttcgacagcaacaacgtcaaggactggcatgccaagtacgagcggctcgcaccaatggtcgtcccccggtcgtcatcgtgcgtccaccggcgacaatttgctctcttggcttgacgttattcagccgctgacgcccgagcatccccctttccttcaacagacaaatcgcccaggacgacgactttgtgctctttagcgttaccatcttcaagaagactaaggacgagttcctccagaagtcacgcgaggcaaagttcatcgcccgcgacttcacgtacgactctggcgcggtcgaggccggtcggaaggagctcgagcgcgcacagcgcgaggagcgggaactttacgtcagtcgcttggatcaaagcgacctgcgctggagatgtcaagctgactggccaatcaccccgaccccagtccgacatgctcaggctcacgcggaccaacttctcggaggccttccagctgctcgtccacctcaaggtgacgcggctctttgtcgagtcggtcctccgctacggcctgccggccgagtacgctggcgtcatcatcaaggtcggttgtcgcgttcgtatgcgctccgtcgcgtctgatcgctgactggctgctttgacccctgctaccctctagcctgaccccaagacgtcgtcaaagctgctcaaggccctcgccggccactacacgtatctccggtcgaagtctgacccgacgcggaagggcaagaagtcgagcggctcgggcgggaccgaggaggctggcgagtgggcgacggtcctcgaggaggagctcgaggactttgtcttcgaggagattggccgcatcgtctagcgtggagccgacttgcagatccagatgttgtcgctatcggaagaccttgaccagcaaggaggtgcgcctgcaactgggtgagtccgagtcgtgcccgtatcgcggcctcgcagagcggcgagcgccaaacctcgcgtggagctgtctgcgaaaaaaaaaacaccacatggagaggcaggcgagtacaagatgagaggggaagaaaatgtgctacaggccgacggtgcgctggcggtagagcagggaaggcagaagtagggcggtggagcgagcaaaagcgcgcctagtagacgtagacgaactgttgcgatggagagacttgtcagacgggtctcgcatcaggcgagcgggcgggcaggggcgcacctcatcgttcttgaagtcggtcagatcgaggcctgcgttggtgagcggagccgcgcccttttgcgagtcaaagacgtcctcgaggtcgacattctcgacgtggcggtcaatcttcttgagcatgctccggtcaatgatcttggccggcttgccgacggcgacccgctgagccatcttccggcggttgagccagacaaagccaaaccacagcatgccaaccagagcgctctgcgcgatgaaaagagctgagcaaagtcaagtgggctgtcagcaactgcgccactccagaggagcccgacgcgccggataacagcaagatcactcacccatgacggcctggagtccaggcctgtaccggggggcatcctgactcttgaagagcaagggtccgacgatgctgcgaggggcgagggtatcacgtcagctggaggaagagaagggaaagcgggcaagaaagggaccgactttccgcaactcgagccgatctggtacatagagacgctgacgctccgcttggtgtggccggcaacgtttgagacaagccacgaaatgaggagcgggttgcaggcgaagaggctggcgcgcgagaggaacacgttagctgcgtgcggcttatgttcgtcaaaggaagcgagctgctcacgccgcaaagaggtagtaggcgatcaggcatccaacctgctgggccttggtgttttgagggagggcgtagaggagggccgcgccgaggacgcaaggcagcgagagcgaggcaatagttgcgcctttgtacctgtacttgacggcggccgcgcaggcaaagacgatgacgatcgtctggagtgcaccgaaaggaaggttgagcaagaagacctcgcggcccgagaagccgaggccgccgatcagggtcgggccgaagacgttgctgttcaaggtccggtgaagggtcagcgtcggctgaaaggggtccaggggggtcaatgacgagacgcacgagaccgaggcgcccgtattgtttgtgaaggcgagcgtgacgaacgcccaggtgacaggcgaccacatggcctcgtaaagctggttccaaaccagattattagactccttgccgccctggttctcggcgacgcgctgcacggcccaagtacgctcctcctcggtgaggaagcgggcaaaggccgggccgttgtcgagccgccagtacaccagaggagctgtaaggacggtcaagaggccgacgatgaggaagaggatctggtagatgtgaaggctcgcgttcttgggaatgaatgagcagccaaaggcgagcagcgagccgaggatcgaggctaggccgttgctaccgtaccagagagcgatgcgcagaggctgctcctggcgtcggtaccaggtggccgtcacgagggaaaagagagggaggcacgaggcctcaaagagaccgaggaggaagcggcaggcgaggatcggcccatacgacgtcgagcaggcgaggccgatggtggatacgccccagcagaagacgagcgtcggcatctgcgatcggcgggataaaggtcagtgattgtctggatatgtcgcacccaaagggaagacacgcacgaggtctggcgagcgtagtcgacgcagatgcgggcgggatcagctgccggctaggcgatttgaattgcacacaacggcactcacagcgaacagggaccttgaccatgacgatggccgagaagggctgccatgcgagctgcgcccaatagcctgccgagccgatgattgagtagctgcaggatgaacggatcagcttccggcgaagtccatcgcagattgagatcggaggtgcgcacttgtcgccagtaaggttggcgtcttcgcgaaagccgaggaccgctccgtatcccaagaccgacttgtccaagatttgcaggaactggtcgggcggggtaccggtcgagcgacatacgcgtcagccagtatcgccttcctgcctcgacagcgtcgactgacgtagacccagacgaggagcggcaggatgacccggtcgatcttgcgccggacgcggtcgttctgctcctgcgtcaacggcaccgagccggtatccacctcggtcttgaagtcgctgtcacaggatgagatcaatcgtcaggactcggcaagaagcacgaaggagagctcgacgcacttggacgatcggtcaaagtgctggtcttcgcccttgtcggccttgaggtcggtttttaggtcggccgggttgggtgaggccatcttgcgcagcgaatcagtggaagaggcgaagcagtgaaagaggaagggtagagcagagactcggggggacggaggtgagagctgaggcgaaggagcgagctcaagtcgaggtgagccgggagccggaggtgggttggctggtgggacggcgagggcgggtgagtgggaggggaagaggggccagctggcgaccccccgcccgggctcttgtaccgaccggccagatacccagttcatcagcggcaggctggccagcatgccggccgatctgcgcggttcgggaggcctggaggcgtcgtgcaagcatacccttcgtgcagctgcgctcgaagcagaggcacaatcgagcccttcagcgctgctaagggcgtcagcgtgtcgaccagttcgacaggatcggcctcgcgtgttctcctagcgcgtcagtagagctcctgccccccccagaaggcgtgcaagacggtcagcctgagctcccgggaggataactctgtcagtccagctcgcagccggtcgggggtttgaacgggtccccatcttgggccccccgttttagacgcgactccgcaagcggcccccgccgcagggcgagtatgccgctcttgacctcggccggccgttgaggaccgctcggtcggcaagctggccgcggagagaacggcgacgccgacggacggcaagagggcgacgacgctctcctttgacgagcttcggttgtggagccgagagtcgcctgcacccggtccgcagcgtcgggcgacctacgagtggtcctcggtcgtcgttgacgcgcaagctggccggtctcccggtggccgaccttcgactgaccagagggagctgcttactgtcagcaggcggcgacgcggtgaccgcgctcccggctcccggggcagacgaagaaggaacggcggcgcagcaggcggagcggcctgctggcctcgcccgacgtaggaggtgcgagcggcgttgcggcgtggcgacatcccttctggacgatggcatgactgcgtccttgatggccagggcaggagtggagaggaaggaggttagccttgcctggccgaccaccgcgatgcagaccagcgaagacgacccctcctttcgaaaggattgctctcgcgtccgctggtacacctcccaggctcagacctgctgttgctgactaggatgagctgcatagagccgcatccgaggtgggtcagcgagaggtcgtcgtcaggcgagacgagcaggtctccggctgcgtcccttcacctttgcgctccgttccctgcgaggagcgaccgcggaccctcctgtcgccctgtcgctcaggcctctagccttccttctgtgacgctcgacgtcgaccctctccgcaagagcgagcctgccggccttacacgctgacctgagcgatccgagtagcgtacgacctccggccagagtagagtactcgagcgtcagcgcgcgccgtcgtgctgctcggccgtcagctcgccgacaggggttctggctcgatgctctgaaggcgctgtcgctgctgacgacgcaggagaaggccggccgtcagccctggtcatggctctcgagctgcgacccgtcagcgacgaaccagcatctccatcgtgccggtgcgcgaagcgcccaggccgaagaggcgcttggcgccgcgtcgccgacctcccggcggtgttgcttcgagcgacgcgtccgcctactctcccgtcccggcacccctctcacctggttagttcctggtcagtttgcagctctaccttgccgcgtctgtcgttgtcgagcacctgcctccgcgatggaggtctgcatccgtcggctggtgcccgccgccggccggacctgctgcgctgctccctccctccctccgcccgctcctcgcgcgcgccgggctgacttcgacgcccttttgctttctccagcctgtcaccgccgccttcactcgtctctcaccaacgcccgtccgacctcctcgccctcgcccttgacagaccgccctgctcctgcccacccgcccgctcgcttcaatagccaactctcgcccgaatctcgccgccgccgccgatgaagctctttccggcgaccctctcggccgttccgctcctgctgctctcgtcgttcctctcgctcgccccgctcgcgaccgaggcagcgaccggccgggacgggccaagtcactttatcatcgagacaccgtcgtcgaagagcccgtggaaggccgactcggtcaacccgctcgtctggacctactcgaagagtacgtcccagcatcgacgcgccggctgctgggagaggtcgcgaaggagggagggcgcaggggaggcgcgcgccgacgtcgacgacgacccatcgtcccgtcgtcgctctcgtccagagcgagccagagccgcctgcgagctccagctttgcgcaatctctggtttcagcggtgctctggctgtgggcccgccctggctacggctcagggagcctcagaggacgagcttcggcgccgagggcagagcagtgacggtcgcgtcggccccggcggtcgcagcagcgcctgacgaccacgtcagaacgcgccggactgacctgcccatttctcgcaaccgcccagcgtccatcctgcagtttgacgtcgagctcttgcggctgtcggggaccggcctcctgctagtcgccaagaatggtcagtctgaagcttcggcccgactcttgacctgcaccgctgacgaccggcgtcgcctccgcgtccagtgcccatcatcgacggcaaggccgtcatcgccgtcgaggacattcccgagggcgacgactacttcgccatcttcatggactcttacgacggcaccgtacgtccttgcgcgcttgacgtgccggccctctttcaggggggcgctgacgatttcggagtcgtaccgtactgacgaaaatccggtcgcccatcgcttcttcaggtcttctcgcgatcgtcgaaattctcgatcaactccagtgcgtagcagcagcggcgcgaatgacgtgacggcagggcgcaagctgatctttcctgctccagacaacaccgcatcgacctcggttgaggcgtcgctgacgatgacaatcacgggcgcacccaagtacgtcgccgccccgccacttgctgcacaacctttctgaccatgctttttatcagcccgacacgcgcgttcgagacgacgctggaggcgctggcgacgacgacgacggtcggcggcgtcgagtacgttgcctcgtcggctcagccgggcgcctcgcccgtcctggccgcctgcgtcggcgtcgccctgagcgctgcggctgtagccgctggtttcggccttggcctctagacgagctggcctcgtaacaactcggggctttccgttggctcgagcttgtcacccactcccttcgcactcgcaacccccttcctctcgctgctcggctcagcctcgacccgtgtttatgccggccactcctttatatcgttcttcttctttcctgtctccctgctagcccgctgtcctctcttcatcctcatcctccccaactcccactggaccctgttcttctcccactcctctcctttcgctactgccctcgcacaatctgtgcgaatgagctgactcgaccaactcggtctcgaacccctatcaatgcgcaaaacattcaatacagctctccttccctcagcgcaccgccgcaccctcgacggcccgctcgtagcgcgcgagccgggcgaggcccgactcggacgagttccagagctccgtcccagctgagtcgtcggcgctggcgagcgacggcaggccggcctgctcaatcgcaaacgaggcggcgaccgagccgtagaggatggctttggcgggcgagcagggtgacggggcagagtggtcagtacggtacgcacccgcgaggggttgccgagggactgccaaacctcggtacgcgtccccgcccgtcaagctcaacccagcgcacagcccgccgaggaaagcgttccccccgcccgtgacgtctttcacgcgcgcctggtcggcctcgccaaagacggccggcagccagcgaacagagtctggcgcggaggcgagcgcaaagcagacgccctcgggcccggcgcggatgacggccgcccgctgctgctgagaaggttgccggcggccggcgccgttgcgtggcagcatgaccagccatgaagccaacttgcgcgtcgcatcttcgatctgcttgcgctggccggtcgccgtcgacgcgggcgtgaggccaagcagggcgagcgcctcgaggtgattcggcgaaaggatggtcatgtgtgcgctggcggcggtaattgctggtcgattggcgggcgtgcagtcgggcggcatggctggagcggagcaggatcgtcgttcgtcagcctccaggtgccctctgagagcaaaggcaaagggtgaagagaatgatccacgcacgttcccagacgagccccgtacgcgaccaattgagctccgccacctcactgacgacctgctcggcccgttctggcccgcaaacgaagtggaggtacgaaggtgggccgtctgcctcgctcccgacaaagggcgagctcggcagctgggcgggcgagatgcgcttgcgggcggtcaggtagctgaggccgtgcagttgacgggcgtaagcaggagtgagaacgacgtttgagaagcgcacgagggacggaccggaagctttggtagccctcgctagatggcttcagtgatcaggctctcgacaagactcgctcacccgaagcaagccagaagcgtcgcgcgactcacccgcgctcctcgccggcatagatgttgagcgcccgtgtagtcagctccgattcgccctcggcactcgttcgcggtcggaaccaccacatggcttggccgaagcgctcgagggcggtccgcatcggtagggggaagtcggagccgacgtcgacgaccatgccgagcttggcggcggggaggaagagccgggcgccgacgatcgcttcgagagtaggaggaggccgtcaggacttgagaaagggagactggctctgaatggaagaccgaccataggtgccgccgccaccaatctgtgcgtgcggtgcgatggacgcggcaggagaggcgtcagctcggcctcgacctgcttctgcaaggccgcctgccggtcgagccatacctgctcaggatgatggtcctcgatgacctctcccgtctcgacgtccctgtgctcaaactggtcgatgatgaactggcctgtcgaagggccgagcgccgtcgtcgttgggtgagctcttcgggtttggaaaggggcaagagcgcgcgtgcgaggtctgaccgagcgtgacgactcgacctggcccggcggcctcagcgttcgtagacatgggcggggaaggtgcgcgggacacggcctgtgtacgcgagtgctgctgcgaaaggagtcgagagtaaggtcggtcggcctgttgctgtcgggcggtcggtcggggctgcctgctgtcgtcgagctctctcggcgcgcgggcggccgccctgccctgcagcagcagaggtcttttcccgcgccgcctgccgaacacccacaccttccctcccctccgtccctccctctacccacactctccttccccttagccatgtcgaccgagaccgtctccgagcagggcttcttcgcctccgtcttctccgccgtcttctcgacgtacgtccctccgtcgcccgcgcccgggcgttttccgccctgcgtcccgagccaatcaggccggcgcccgatcgtgctctatcctcctctctctctctgcctcgatggctgaccctctcctttcgggtgtcgcacgatgcagggcacacgccgaggaggaggagaaggccgacgcacctcccgccgaggacgaggaggccgagtccaaggaggacgagtcggcgccggaggaggaggccgaggaggaggccgcgcccgccgaggaggaggaggaggaggaggaggagcccgaggacgtgcgttctgctttacctcgaggggcagctggaccctgaagaggtccaacgctggtcgcggcgcaagctcagcgagacgtttggttcgagctgacgtccttgactccctctctcacccggccgatctgcctaccgctcgcgaccgacctcctgcgcgtcctcgatccctcgtcgctcggccgcctgcccgtcgctccgccctctctctccaccctttgccacctcccactctacagatcatgcccgccctccgcgagcagtgcgagaagacgccccagtgcgcgccggcaaaggcccacttccagcactgcgaggagaaggtccgggccggcaagggctgggagcacgaggactgcgtcgacgagctctggcacgtacgtcgctttccgctgagtcttcgactgtcgaccaactgggtgcaggcgggctcgtcgcttcgtctagcggctgccccgggagccggcgcccgtccgatgctgtgtgctcgagctcgagccttcgaactgactctctgcccctccccatttcttctgtgccacgccttcagctcatgcactgcgtcgacgtccgtccctctaatggttcctccttgcccctgccggtcgttccactgtcgctgacccccctcgtcctacaccacccaccaggcctgcgttgcccctaagctcttcaagaagctcgcctaaaccccttcttactacaaatggaaataggggtcgcagcacaggggtcgggagcaggctcgctggtgactcgttcctcgatcggagcgggatctggcgaaacggacggaggagggaccgtagattcacggtggaggctaagaggaggtcgtgctcgaggcggctaaccctctgcggcggaaggaggaggagggagagaagagtcggggagcctttgctcgtcttgcttgggcctctgtcataggcacggcttggggagggactggcccgattgaattagaatcgtcgtcaacgttggaggatcgaagaggctgaaggcagggagtatagcggcgtcctctcgccagcgggtgcgacttgaagacaggggcagtgtctgccacccaagttgttccgagcaaaactcgagtccatcctgttacaggtatataattcgtgaggttcggcaaggaggtcaggtcggggtcgccgggcggccgacgcacgaagccgagccgagccacgcacgaacgaccgactgtcaaacgaccagcagcctcgaccgcccctcgccctcctagatcgcgccagccatgcagccgtccctcatcacctcgctccgagcggtcgcccgcccgacgaccgctgctgcccggagcatctcgagcacgcccgccgcgctcgaccgcgcagaatcggcggccaaggttgccaacgcgacgcagagtgcgtccgcttcgtcgtctccgtttcgcgagcgccggctcatgacgagcaaaaggctgacttaccgcctggattttgacctgacaatcagaggtcgagaagacgtttggccgcttttggaagacggtcaacttgaaggagacgcctgaaggtcggtccacttgcgcgagcctcgcaccggagctcaccgctacctcgcagcccctcgttccgaggcagcgcttaccagcatcgaccactgatgcccttgcgctcacgcccggcgccggccgaacgtaggctaccaggtcctgctcgacgcccggccgctcaagacacccggcggcaaggcgctctggatcccggccgagaagaaggcgctcgcgtacctgatcgcggccgagtgggacaaccagaagcaggtgctcaagggccatgcgctcccgatggtgcgacgcgacaagtcgtctcggctgcagtacggcagggctacaggctgattgaactcgccgttgcaaccttggcagacctcgctcgcctcgcgcgcgctcgacgccctctccgactcgccctcgctcccttccgccccggcctccgtcgccccaaaggccaagaaccgcgaggaggtcgtctcggccttgctaaagtacctcgacaccgataccatctgcttccacgaggagaagccgtggcggctcgtcaagctccaggacgagcgctgggtgccgatcctcgactgggtcaaggagacgtacggcgagggtgcgcccggacgcaaggcagtcgactgtcggctctccttcccgagctgaccctcttgtcgcccgctcgcagttacggtctttgacggcctctttgccaagggccacccgaaagagacacgcgagaagctcgaggccgtcatctctgcctactcgccgttcaagctcgccggtgcgtcccgccatccctcggctcgcgcgactccctaagacgtcaccctgacgacttgcatctttactccgtaccgcagcctttgagcgggcagtgtacacgacaaagtcgttcttgatcgcgctcgcgttgctcgagggtcggctgacggtcgaggaggcggcgctcgcgagccaggtcgaggtcgactcgcagattgacctctggggcgaggtcgaggacagtcggtcctcctactcctctccggctcgagtcttcgagccttgctgacgaccctcttcctcgatctcgacagcgcacgatgtcgacaagcaggacgtccgccgacagctcggctcggtccgctgcctcctgctcgagagcaagtcggcctgatgcgcatgccaagcttagcaagcgagaatcatcatcgaagcacagcaggcagggaggtgaaagagatacagcgtttgagaggcgtggagacgtccaaaagagggaacacggaacgcagaggatgacggcagggggaggcttaggtcttgacgattgtcacggtctgtgacgcgttttggaggacgtgctgcgagaccgacgagctgctcatgagcttcttgaacctgcgggcggaaagggcacacgctcggtaagctctctgctccctggcagcacgaaagagaggaagccattgcgtaccggccgagcttgcgccggccgaggaggatcgtgtcgaccttgtggaagtctgcgagcgcgaggagcgccgcccggacctcgccgtgggcgacgtggatcgtgacatcgaggcccttctcgagcagcgcctgggccttcttggtcaggttctgagtcgccgtgtcgttaaggccgcgaaggacctgggcatcctcgaggtaggcgacgctttgcgagaagacgacggcaggcacaattgtcaatcaagacggcactcgatgcaaaaaaagggccaggcctgacgcactcattctttgaaatgttgaggacctggacgaagaagacgtggtcgccctcgtgcgcggtccggaggaggtactggtaggcgagctcggcctcgccgtcctcgttgtaggcgagcaggtagcgcgtcttacccgactcttcattccccttgaggtggatgacggtgctcaggttgcggtctgccagggagcgagcgacgagaggccaagagtgatcagcagctgtgtcgagagaatcgtgggctgagacaagtggagggtgcgacgcacgctcgagcatgtcggcccggagctggatctcgggggctgctgcgctgaacgagagctctccctggtctccagacgaaaggaatcgggtcagctcgagaaatcgcaagagaggtgacggatgctgaccttctcgttcgtaacgatgtggcgacgggtgttggcatctgtccgagagagatggcggtcagtcagggcttggcgtccgtcagagagagcgaggtgcgatgggcgagcggagcgcggcggagacacaccagacatggtgggcttggtcagatggagatgataggcgggtgatggtggtggtgggagagatgagggattctctcctccgctagcctggccctttgtagggagccggtccaagcaacgccaggggaagcgagcggaatcaacgtcacagggtcggccagaaggcttgagaagtgcggagcggccgctgcaccctcgtcgacgcccgtgcctccgcttccgccggcttgccacatcgtcttgacgggcagccgtcttccgaggctcgcactgaacaacagtccgacctggctgcctgttgctgatctcctgcgatgctgccgatgctgtcgtcggctggtcgccgtcggaggttacgagatgggcgactgcgggcgccggctacttcggcccgcgggctgaaccggagggaggatatcctccaacgaccacctttctcgacagcagcaatgtcggccccagacctccgcctcagcaccctgttcgacgtccggcgcaagacggtcctcatcaccggcggcggtggtggcctcggcctcatgatgtcggccgctttcgtccagaacggcgccaagggtgagtgatccaggccgagccctcctcggacccctcggaacctcccctgccctccgtctctggccaagagctgacccgtcctgagcgtcgtccgcctccagtctacattgcctcgcgcaagaaggaccagctcgaagcctcggttaaggagctcaacgcgctcggcaaggccagcggcggctcggccgcctacatcgtcgccgacctcaaggacaaggccggctgcgaggcggtcgcaaaggagctcaaggcaaaggaggccaagctgcacgtcctcatcaacaacacggggtgcgttcgagttgctgttttgctactgactagtcgagtcgctgacatggctctgctacccttcctccgttgatcgcctgcctgcctgtccgcagcatgagctggggcggcgcgctcgacgactttcctgaggtcgagggctgggaccgcgtgctgggcacgaatgtcaagaggtgcattcagttgtcagcgccctggagcctccctgagttgacgccgtccaacctctccccagcatcttctacatgacgacgctcctgatgccgctcctcgtcgctggctcggccccgctcaacccggcgagcgtcatcaacatctcgtcgatcaacggcatgatcgccgtctcggacaacccgctctcaaagcccggctggggcagctacagctacgcgacctcaaaggcggccgccaaccacctgacgcgtgtcctctcgctcgcgctcgccggcaggggcattaacgtcaatgcgatcgcgccgggcgtctatccgtcaaagatgacggcctacgggatcaagacggccgagaaggccctgctcgagcttcagccaaacggccggctcggcacgaccgagggtgcatccgggcgaggggctccctgtcgactcgtcgcggcgctgaccggccgcacttcatcccacagacattgccggcctcgcactcttccttgccagtcgagcgggttctcacgtgacgggcgctgtcatcccgaccgacggcggcgcaagcctcagcctcggggcgaaattccagcagcccgagcgcgcaaagctttgatttaacctctccatctgtctgcctcctccatcacgatcatgacctccctttccttcgagcttgcgctttcgcctctgagagaggctcatcggcgcatgattcagcgtcatcggatatcatcagagcatggagtagggcatgactggcgtgaaagagagaaagggctgcgttcagtcgtcaattatgagaaagtcgcctggccggcaaggctcaagcgccgagcgagatccggtcctcctcctcaaggcaccgtgtccacaggccgtcgccgtcccagtcgatggccttcgctttgtcctcctgacgagcattccgttccagtcagtaagcaatcgtgtcaatcatcgcctcaggggtcaatacctacctgcgtcagcgtcaaccggttccagacgccccgagcgatccgctggtgggccgcacgagaagggtggaagcagtcgctgcggtagcaaagcatgtcagccgacgtttgaggcgagacttgcgacacagagacggacgcaggtgagagggcctcaattgggacagccgataggttgagggccatcggaggctggtacgcaacgccactgaaacagagtcgacgggaagacgacgtcaggttcgccacgtagcccgtgcgtcagactacgcacaaggtcgaatagttgcgaatcgcgtaatcctgcgcgatcctgacaagacgctggtctgattcgacgtcggctctcgtcagctttcaattgatcaagaaggtctaggatatttcgaacgcactgtaccgagtctgcagccagcgcatcctcgcccgcgttatctcgccgagctcgccgtcgcgcaacgcgcagccgcactgcaagccgttgagcttgatcgcctgctcgcagtaggggtgtcggccgttgtcggtcaggtcgtgcagaggtgagacgtcaaagacgccgacgaggttgaccagggtacgggctggcgagaagagggtcaggccagcgtcagccggtgcgagaaggtgctgcaagatgaggatcagacgtacgtatttcgagccgggcgagctcaaggacctcacggacgctcagctcgaacagagccgggcctccagggccgccaacatcaactgaagtgggcggaacgtgcgacagcaagtcagcacaggccgactgtccttggggcgggcatgacgcgccggtcgagcagagactgcaaaggtcgtttgacccgatttgcagcgagaggtagttccagccttcgacccgccggatctgtcgcatcgcctggatctggaggatgaggtagtctgcgggcggccgcacggtcgacggcggtcagctcgcccggccgcgctgtaccaggttgcaaacccgccatgagcgcacctctggcctggtgcatcaggttggtcgcgagcgagccagagagagccgcattcagacgatccttggccggattccactggacaggccccacggggcagagggttccttgagatggccagggcagaagccgctgctcaggctccttccgcgcagcagcagcggcgacagcagagaacgtaccccagcagatctcgggcggatgttcgccgagggagaagcccgtcagattccggttgtagtggcgcatgatctgacggcacgggtgatagcagggatatttagcactattgctcgccggcccgttgccgagtgacggtcggcacaaggagagaagctgcgggagagcgcgagcaaagcgacctagcggcagcagctgcgacacaagctgttctcgcctacagcagacggacgtacgttgggcaccgtcacctcgcctttgtcccctccggccgcccacgacgagccgcggtactcgtaagccgttaggtcgggcgtctcgcggatgccgccgagcatccagcctgcgctgatcgagtcgccgagcgccgacgtcgtgctgcgaccaggccgagctcgcactatcagcagcggctctaagagcggggctagctcaacggggtcaagactgacgagaagtcatctggccggaggtcccagggtcctgcagggccggaagacgatggccagcgggcgagcggcgggcactcggcgaccgaccggcgccaggtcccttcgcgcatgatgggcgaggtcggtctgctgttaagaagaggctgctgctgagcgtgctccagagcgagactcgaagagactaggaacagcagtgagaagggcaggaggatgagcatggccggagacgggtctgcgagttgttgtcggtcggctggccgagtcggacccggccgacagcgtcagctcaaggcagcaaggctcgcgtaccatcacttgctcgagtcctcacacgacccgactcagggcaagcccgacgaggagacgataccagacgctaagggacacacacgcgagcgggatgatagtctcggaaatcgctgctgatatcgggcggcctcatcgcggctcagactgcagcgacgcccaatccgccgacagacgagcgcctcggagggcagttgttcaggagcgtaaagggtcatgagttgcaaggctacatgtggaatagaggagagagcgaggaagggagcgatgccgggcagacagtcttagatggactgcttgttggcctcagccttggcgtcgtgcttcgactcgtcggccttgtcgccgagggcgtcctgagaggaggggggggggggggggggcaagaataagcaagggtgagcgggagggccgacagccctgcctccgtcgtcgaggctgggctgtcggctgctcgaccggcctgcgtcgacggaggagggcctcggccctcgactctgcgcacgctcgacgcctcgttcctccgcagccttcttttttcctccggccgaacgcccgatctccgatatcggcggacgggtcgcgcctgcggcgtgtttggtgcaggtcggtttggcggcgctcgcctcgtcgagaccatcggtcggccttcattcaagcctcgtcggcggcgaatgggctggccggcctcctttgttctggccctcgtgttcccgtcctgagccggcccaacctgccacaggtgaataagcatggcgggccgaacgaggcgcaaatgtacatccgacgaggagcgagaggtgcgacaggtctcgggaggaagactggccccaggagcgacccgcccttggcccgcctgctctgtcgctggatgttggccagcagagccagatcaatggaccgccttcgtaggcagcacaagcatcgcctggcctcgatctagcgagcggaggtcccgcctggccggcgaggcaagcatccgaggtagcgttacgatgcgtctgccttcaatggcgagcgcatcggccaggcgagcgaacgtgcgacgagcagcagcaagcagagctgtcagttcctgacgggtcagcgtcgtgcccgatcgcccctccgtgatgcaggtgatgagacatgatctggtgcgacacagcgcgagcgggtctacaagggcgaccttttattgcgggggaaggaagaggtcctcgtcaagggcgtgtggggtcgtgaaggtcgtcaggctgagaaaggagagtctcagaaagggatgagattgtaaggggaagcaggaaacaaggcgacggtcaccagctgctgaggacgctcgagctgcagagcaaaagcgaggccggtcagtgactgatgaacggcagcgagccagagcagaaggcttcatgactcacgcatactcgccgagctgctggaggccgtgatagccggcgaccgagacgataagtgcaagcctcttcgagaggtcggccttgccgacggtcgacacgaaggccgagccgcagtagcaggtcgccgtcaggttggcgtcgcggacctgcttgcacttctggcacatgagctggagcgaccgacagggagtggtgcgtcagttgcaggcctcgagggattgacgacaaacgggaaagacgtacgtcttggagctggtactgcaggacaagccgctgcacgtactcgatcaagcggatctcgattccctgggtgtcgagcagatggccggtcgggcaaagccacgaagcattgcgcggcggcacgagctggcgccgtatcgagccgtcgtcggcctggatctcgacgagctgtggcagccgctccgggtcgcggcagaggtcgaggtcgcgcgacgactggcactgggtgcagatgacggacggcagccggaggacgtcgcaggggttccggaagaccgccgtgtcggcaaactcgcggacgccgataaggtcgagcaggttgcgcttgagcacctggacctcgaccgagaggtcgcgcgcgagaccgaggacgtggcagaccgtcttgacaaactcgagcgccgggttcgtcggtcggagatgcgagccgggcaggattgggaacaggagcgtctcggctatttcggggtgcgttggcgcgagcttctggttggcgaggatgtcttggacgagcgcgagcagcttgcgcgtgagcttgcggccgatgaccttcctggcgagcccgacctccttctccttgaccgggtcgagggcagggccggtcgactgcgtcagctggatcgcccgcagaggctcgcgctcctgctcgaccgcctggcgcttagaccggaacatctggtcgatgaaggacgagatgacgacctcaaagtcgtgctggatggccggcggcaggaaggaccggacgttccactcgaggtcgataacgtgccggccgacgacgacgtcctcggccgctagagttggtgcagagcggcgcggggtcagtaaacgggagcgggcgggacgagactgagtgcgggcagacgcacagtcctcgggcaagacggggatgccgccgtggttctggacgtccatccagacgagcgtctcccagaagttgacgatctcaaacgagaggtgccgaaagagctcgttggcattggccgccgtcaaaaggtactttgcgtaggcgaccgtgttggccgtcgacggcttggacgtcaggagaatgatctcgttgaagtcggcgtagacgacggttgatccgagccggcggaactcggccagcagctggataaacgtcttcttcatgaggccgtggaggaagcggtggatgcccgggtcaaacatgccggccgcgctcgagctgatccagcgccaaaagttgtcgacaagcaggtcggcgaccgggttggtgccggcgatccgcgccttgtcaaggtaccagcccttgaccatgctcttgaggatcgcaaacgtctgggtcgagaggacggcgtcaccgagcgtgagcgagttgtgggccgcgcccttcgagtagtcgtcgagcgtgtgcgaagccgaatcgaacgcgagcgcgcccgagccgctgccctcgagctcgttgacgagcgcagactggaggagggcgtcgattgccaggtcctggagagcgatccggaacgtgacgttcgtgtagcagcccgcgttcgagaactcggggctaccgagctcgtcgatcgcctgaggcgtgttggcgtcgtcctcgatgccgccgaggtcgggtcgagcggcgggcgcccaccagaggaccatgtcctgggcggcgagccggcgagcaaagtcaatgtcggcgaggaagagcggcgcgtcgccttcaatgttgccagcagggacgtcgtagtggcgggccatctcgaggtgctctttgagccgggccgacatgctcaggtaggcgacaatcatccgccgcgtcgtgtggttgagccacatgagtgccgagcccgactccctgccgcttgggagcgcgatcaccggaaagtcactgatcgccggcgcccgaagctcgagctcgggctggctccggggcgaaaagacgacgaggacggttggctgcgtccgctgcgcggcgaatgtcgcgagctcgcggttgagcgcccggtagccgacctgggccgtgccgtggtagctgacggcaaactcgaggtcggccgagtattcaaagacgccctgcttgcggtggtcggccggcagggcaaagcgctcgctgtagaagcgcgggaggtgcgcaatcggctggcgggtccgcgcaccgtcgatcgagatgaccttggccgaggtgtcgggcgagaagaggccaatgatctcgcgcgagtcgtgcgtcgagtggtagagaaagaggaagcggatcccgcggccgttgttgaggtagggctgccggctgagcttggagcttgcccgctcgagctcgtgcaagtcaaagccggcgtcgaggccgcggttgagaccgcccttggccgccttgtcgagcgcgcaggtcgtgccgaattggagaagggcgcggacgacgagcgggaccttgagaaagagaagaagagctgaggtcagcggtggcggcttatatgctcgagccaagcccggcgggacacacctgtagctcgtaaacagagtcgacgttggggttgttgatcaggccggagaagtgcgactcgccctggaggtagagccgctcgtcgacggtgatccggtagaggttctgacacgggtggttgcgcggcagcgtccggacgagcggttcagcgtcgtactcgggcaggaagacgggcttcttggggacggtccggaggttgaggtaaaacgagcgaggcacgcggaccttgacgcgctggaaggcgccgtcgatcgagagccagaggttaaagaggcctggccgggacgtcggcgcgacctgaatgacctcccagttgcgcgagagcatgttggtcgtccgctgcttgaacattgacgagagcgagccgtcgttccgcgctacctgaccgccatgacgcatctgcagcttgagggccttctgcttgcgccaccggccgcgcatgacgcggatccagccggggtagtcgactctagcgtccggcagaggctcctcgactggcaccggcggcggcgagcgcgccttcttggtgaccttggcgaccgaccggccgccgttcgcaccgccgccggttgactggccaaagtcctccatgtcagccgcgaccgacggcggcgaggcgttggaccgcatcttggcaaagaggtcggtcagcttgtgctgctggaacttatcctcgcgcgtcgcaacccgcttgtgtagccagtctgggtgccgcacacgcgggaccggctgcgttgaggagagaacggagcgtcagtgacggctcgagtgagagaaggcaagcagccgatgccaaacgtacgttggccaccttctgaagggcggcagggatcgtgatgagcttttgtatgacggagccgaggcgttcggtgtagtagtcccagtcgaggacgtttcgcagctcaaagttggtcaggctgagcaagaagagaaagggtcagcacgtgcatcgaacgaggccgaagccgagagaatcagagccgcacctgttatccttgagccactttttgagaaagtggcgcttgatggtcggctcggcgtcaaagatggcgatcgggacggcccgctcggtgacgggcgcgccgtagggcttggccgagatgatgaacttgcaggcgaggcccttatccttgaccatctggtcgccgaggaactcggccagccggcgggccgtgctgatcgaggtcgacttctgggcgccgtactcggcgagcgtctttgacatcgaccggttctcggcaatcaggtcgacgagctcctcgtcctccatgctggccgccttggaggcgaggacgtcgagccattggtcggcgacctgggcgacggcagcgtagcactcttcggtcgtcgttccgagcaagaacttctcaaagatctggccctggaagatcttgatgagctggagctcgccacggcgcttgatctcaaagcccttaagctcggcgagcgagttgtcgtggttaaagacggcgtagcgcttcttgaggagcttgtcctcctccttggacgacggcaggatcatggccttgtagggcccatcgagctcgaagaagatcgagttctcactccggacggcgtacgtgccgcggtccttgtcaacgagctcgtggtactggtcgttggtaaacttggcgtggacgagatggttgagcatcgtgcacgggtacgagaggccaaacgtcttgccgccggcgagcttgaacgtaaagtcctccgggaacgagccggggagcatgcaccagatgccgtcggtgtcgagctcgagcggccggccgatttgctcgacgagctcgcgcgccatctgaatgatggtcgcgccggtcaggcaggtgatgccggccatctccatcgagtaccagcgcgcgcctttgcgcatgacgtagccatagaacgaattgaggatgcacttgtgcgcgagctggagcgagtcgtagatgacgaccatctgcttggcctcggtcacctcggcgagcgagccattgttcttgctcgcgccgtcgaggttcttcttccacgtcttgtggaggcccttgtactcgtaccgccggtcgcggaaggcgcggaccgtgtcaatgtagaatggattctcgcgctggcagacgattgcctccttggtgataatcttggtctcgtgggccttgcggtagaccttgcgcgagtagtcgccgagccgcttgtggatcagggccgtctgctcggcctcgatcaggtcaacaaaccgccgctcggggcccttgccgaaccggccggggaacgactcttgctcgagcgcattcttgaccatgttgaactcgtcgcgcttcgccgggaagtactcgccacgccaggcccactccatccgccggtcgcacgtcttgtcgggccggttaaagtcgcacgtcgcgcacatggcctcgtcgacgatcgagtcgggctggagccggttcgacagcatgatgttggggtacatggctgcaacgtcgagatggtagatgagcggcttgtccatccgggcaggtgtgtcgcgcaggtcctcaagcgccgcctggatctcggccttgatggcgtcatagttctcgacgtcctcaagcttgacgttgccttcggtgacgagcgagaacttcagcgcggcgtcgaggtcgtcgatgagctaaggcgtaaacacgggaccagtgtcagtggtgggggcagcgcagacaggaacaaaaccgcaggtcgcacctgctgcatcgccttgggctcgaccttgaactgggtctcgatgtcgctccggaagacgccggcctcgagagcctcgacgtgaccgccgacgtacgtctcggacgagagcaggtggccgtcgaacatgttgccatttggctcgatgtaccggttcggcatgatgatgccgccttggaaggcctcgacctgtgcagggaaggaagacaaaccggcgtcagctcggcgaagagggcgaggcgaagctgggcgagggacggaccatgagtagcgtttcgcagagcgtacccgtgcccttgcggaggacgtcgtccgggttgagcggaatgatgttgcagagggagaagacgaacgggttgacgtaggtcatgtagaggtagtatgtggcgacagcgtccgagaccgagtactgggcaaggatttgcggctgctcgacggcatacctgaacgagcgggcgagcggggaagaggtcagcgacctgggagcagtgtcgagggcccaggagcgaggcactcacggcgtcatcagctcgggatcgagctcaatcggctggtagccgagcttataggtcgtcaccgccttgaggccctgactgccttggggcaaatacgagtcgcgcttgacccagctgcagaggcaagtcaagcattagcgcacgagcccagccgacacggagacaccacagcgacgcaccggaagcagtccatgtggacgcagctgcgcgacttgtactcgtcctccgagtcgcgctcaaagccaatttcgttgagcatgctgagaccgtggatcgttgcccgggcgtcgacgtaagggaagtcgaagccgtcgccattaaaggtcgccatgacggtcggccggacctcgcggatgtgctcgaaccagcgctcgatcgtcgctttctacaggagagacagttgcgacaaggtgggtcagtaaactgccggtcgatccgcgcaacggcttgcgtcaggacgcacctcgtcggcctcgttgaagatggtgaatgggccctcgtactcgggctttggcgtgtattcaaagtcctcgatgtcttcgctgacgatttcgcggtttgtaatgaggaagccctagctcaaaagggaggagggagagtcagcacgcggcggccttgcaaaaggcgagaggcagaccgcacctggccgtcgaccatgtacgagatcatcatgatctggtcgacctgctggtcgggaaacttgagcgggctcttggtgacctcgatgtcgaacgccatgacgaccggctcggcccgcttgacgcggtccgtcagccgctcgagcgagaggacgccgagcagcgagcggaccgtgtaccagagcccgacccggatgtcgaggtcgatcgcaacgcgctggtagaagttgacgtcgtactcgcgcaggtcgttgatgcacgccggggggtcaagctcgcgccggtttgagccggccccgcccgtcgcccagctgccgccggcctcgccaccgccttcgagctcgacgtccatcgtgctagcgccgccgccagtcgcctggatgacttcggcgtaggcgtcaacggccgacagcttggccgcgttggccgtcgcaagcgggaggagctcccgccggaccgagaagaggtcctgggtgttgtggaacgcgagcttgaggaacgtcggccggtagcccttgagatggttgggctgaggagcaggataaaggccgatggtcaggcgcgtcgaagaaggatagaagataagccggcgcgacgacgtaccagcttgaggtcttccttgcgcacgcgcgagacgccgatgatgagaccctcatactttttgagcagccactcctcgacgaccgtctccgagccgagctggagggaggtatatagaccagatgttcagcctgaagtccggcttggctcgagcgtccgcgcgcgccactgaccttgcagccgacaaagaagtagggctcaaaggtaagcgtgctcttgaacatgccgccgtcgtcctggataaagtagaggtcgatggcctgtttgccgccggcgacgagctcgtcggcgagcagcgtctgatgcatgttgacgagccagccggtccgctcctcgcccttcgttccgtgcgagccgacgccgccgccctcccagcgccagaagccgagcttctcgtcaatctcgtcccggatgcggacctcctcgaaacgttcggccgcagagtcgccgtcctttgcccgttcgaaggtcggcccaccgccgcctccaccgggaccggagcccggcttcgacttggtatagcgtgtgttggaacctccgccgccgccgcctcggaagccgccacggccacgaccgcctcggccaccaccccgaccgcccgacgtcaggccaaagatggggttgccaccgcgacccatcggctaggagatagagctggacgagctggtccgagagcgagcggcggccggggtggcgagaggacgaggcgatggacgggggccggagggagagagaaggcgacgcgtagcgacgggccctttcgtggctgctggtcgtcccgctgccgtccgtcaagggcgaggtggaagaatttcgagatagagatgtcgcctgcgacagccgcaaagacagggactagagaagaaagagaagttgtcgaagcgagtgagaggtcgtggcggtcgtctggcagcagcagcagcagccgctcgacaagctcatttggcgctggagcgcttcgagacgcgtcgcgtgccccgtgacgagcatttacgcagaagaacgtgctgtcggcgggagcgacaacgacgctcaagggagcttctctggacaccggtcttgcgagcaggcggtagtaggtgagacactcgagctgacctcgactgccattcgtactgtcgtgtctaggaggttggggacacgacgggcaagggtggcagcgtcttcgcctcgccagcagacgcgcgccgctgctccctctccgcctgtcgacgacgaccccttccgaccgcctcgcccttggctttcaccgcctggccgccaggcgacaacgctcctcgggagatcatggagatcaccatcgacgacgtttggcactttgtccggagctttgccctcggtgcgtctcgaccgtcgccggctgcagcctttgagctgacctgacctcgctcggccctgctacagatcgcttcgtcttgccctatgtcctgctcatttacttgggacgaccacgggaggcaattgtggcagtcctaatcgtcttcatctcgttcaccgtgcaattcagtcagtcgcagtcgttctcgcaaacctgccaattgtcgcgacgctcagagccagcctgacgcccttcctctttcccgcagttggcggcggcccatccctcttcgcccgcctcggcctcgcaccgcacatcggccttcggcaggccttcgcttgctgcgactgttcgcttgcctggcccgaccaggtcgtcctcgtcaccggctcgaggggcgcgctcggctccgagctctgcgctgagcttctgcagcggggcgcgacgatcgttggcgtcgacgtcgtgggcggcgacgagccgtcgaaaggtctgtcactgttcttgtaattgtcctcctagtgctggagattgacgggcttgcgatgctaggcgaacgccggcagtactttttccagaccgacatctcgtcgctgtcggccgtgcgtgcactgccagcggcgatcgaagcggccgtcggccagccggtcacggtgctcatcaacaacgccggggtcgtccatggccggcctatcctcgacctgacggatgctgagatcgaccggtcagtccttgcacaatttgactttggatccaaggacagggctgactcgtggcatacggctcgcgtcgtctcagatccgtcggcgtcaactacttggcccacttgcatcttatcagggcgttcctgccggacatgatcgcccgtaagaagggcacaatcgtgcgttactctcacgcctgttcctctcctgcgtcacttctgcgttctgatgcctcgggcttggcacatacaggtcaccgtctcatcggccctcggactcatcggcgcttcgggcctgaccgactactgctcgacgaaagctgctctcgtcggcctgcatgactctttgacacgggagctcctccatcagtacgtcatctcgcgaagcatggcctgcccttctcccgtctcacgccaagctgactcgcttcctccctctcaacagctataagacgccctttgtcaggacgcacctcgtcttgccagcattcatcggcccctcgccactctttgcacgcgcaagcttgccgacatcgttcctctttcgctttggagcgcctcaactcgagccggccgctctcgccaaggctgtcgtgcagcacgttgggttggggatcggcggcgtcctgagccttcctctgtgtgtctctgctctctgtcgaagtagtgtcgtcttcaggtgctgacgccacttcttcacctcatgccttcagctttgtcaactttgtcccgcttgtccgattgcttccccccttcttgcgagagcttgcacaagcactcgctggcgcagaccgcgcgatggacggcttcgcacctccccggtcagaagcgatgccgccgagcgttgcagtagctgacggtcagtgtcgacgagattgatgcagatcatggccatttcatgagaggcatgctcggacgcatggccgactggcgaagaaaggtgcaagaaggtggtgagggataggggatcaggacagagcatcgggaaactcgatcgaacgggagttaacgtcgatcgggatcgaggctcgtgtgatgcttaggcgtgctgaagaaggcaaaggcgttcaaggtcagtcaatctgcccgacctaagtttggagagactaaagagttcgcacctggatctgcccgtgagacggcttgatcgggtactcggatgacgtgaccgaagccgtgtcgagcgagacctcgttgcgcttcttgccaaagcggaccatgccggcagcgtaaagagcggcgacgagggcggcaaagacagcaacagtcgcagcagcaccgatacctccgctagcagcgttcgagaggccgccgtcggacgaggacgaggtcgccgtcgagacactggtggcctgagcaccgtaagccgcggtcgaggagtgagcggcggcgtacgaaaaggtcgagaccgagctgccgcagatgccacttcggaatgaatagaaggtggggacgtcggtgccgcagccggacgagtaaaggcaggccttcgaggcggtcgcaaaggcatcgtcgcacatgcagctcgaggcggtgctgcgagaaagagggagaagggttgtcagcggtacgaaacccgttgctcaaactttggagtggacagactagtcagagctgctgcagttggccgtcgaggcggccgcagtgaggcagtcaacttggcaggtggtgaggctagggagagaacggcagggcattcggtcccgtcagcgatatgtaatgaacatggagccattgcaactcacgtcgagacgtcggcgctggtcgtcgccgaacttgtcgcggcagcagcagcagcggcggtcgcatgggcagaggcgtagctgaaggtcgcgaccgaagcgccgcaagtcgacgtgcggtcggtgtagaagtcggcgacgtcggtggtgcagccgcccctgtaacgatggatgacagcctcgtcagtcgcggagacaggtagactgatcgaaggagccgacactgactggtagaggcactgcttggtggctgtggcaaaggcatccgagtcgcacaggcaggccgccgaggtgctggcaggtcgacgagggtagcgaatggtcagccgagagacgcgtcaaggttgtatcaggacattcactaatcggtgccgcagcctgatgaggcggccgcctgggtcatgcagtcgacctggcaggtcgcgtaccttgtgcaggagaaagagggaagtcagcgaaagagtcgagccgatgagggcgaaaacggacgacatacgtagagaccgcagacgccagggtggcgacggagaggagaacagcggcgaacttcatgttcgaaaggcgcgagagcaagattgggagaagggttgacgaggagagaaagaggagaaagacgtccctcggccgccctttaacgacggcccttccctcgaaccgccctgcggcgccaacctccagcccttcttctgtcagcgagtccaacatcggccggttctgccaagttcagactttattctcggtgccaaccagcggtggggcgaagagcgccgtaagggagatggcaagggcatcggccggcaagcaccaccgacggcatccgtttgacctgtctgattggttagagctgtacagtctgctgcatcggacaaggtcggttgctattcgggttcggtgggtagcgcggtagcgcgcgtgcgactgcgacggggcggccgcagtcgaccccggaccgagccgcagccgatctgataatcgacacccgacccgagccggtcgttgtccggaacgtctactccctcggccgaagcatgctcggacgacggacgaaaaagccggcgaacaaggtggcctggaggattaaaaaggtcaaacttgctgggcttcggcgacgctcactcccctagctcccctttctccgtcgaccctccctcctactcgtcacttccaccaagatgaagtccttctctactctcgccttcattgcgcttgctgccaccgccgccaacgctgcaacgtgaatccccacgcaccgtgctcgtcgtcagcccttgcgcctcaccactgaccctgtcatccctcggccaccgcagcttcaccaacagccagctcacgtgcgctgcctcgtcgctctcgtcgtgcgacggcgtcaccaacttgtcagtcgttgggcgcgcaaaagtcaacaatgggtgagccgattactgatcagttccgtcctccgtcgtcctctcgcctcatagccaggacgccagctgcgcctgctcggatacgttccagcaatcggtcaaggtctgcctctatcaggtgcgcttcgactcactctcctctctgcgaccgcggtcgtcgatgacgctgacggtaggcgctccgttttcgccttgatcagggcggctctggctcggacgtctcgacctggtttagcgccatcgccgaggcctgctcggccagcggatcgtcctcggccgccgtctcgtccgtcgcttccggctcgtcgtcgtcgacgacgggtgccgccgccgtcaccacctcggtggctgctgccggcacgtcggccgcggcgtcggtcgctagtgatgttacgtcggtcgccgccgctgcgacctcaagcccggctagcgctggcttctcccagactggcctcagctacggtctcggtgctgtcgctgtcggcgccgtcgtcggcagcgccctcttctaggcgcccgagctctggtggtgatggtccgaggggcgaagggagggcgatggggctcgaggcctgagaatgagaacgatgatcgtacatccaagcaagttgctggctgctaaacggatggagactgcgagacgtcagcacgcgacgagggcgacttggttgtcagttcttgtgagcaaggtgctgtttctatctgcccagtcgagctagcggttgcgctggcgaccggccgatacgggcagcgatcagtaagatcggcgccctacggcatcttgaagcacgaccagcgtgacagctgattacgacgtccgatcaaggagaggagcgtcagctttactctgaacgtccggctgtgaagataggccggccatacgaaggagaaatgctcgccaggcggtcggggcttggatcgcctgccgagctcgccgaacgtcttcgccagcaccccgacgcagctagtacgacgagtcgagagcgacggtgggatcagctggagagaccgtccaacagatgagctctttgagcgaggatggcggattggctagggtccaaatggacgtcgggcgacaaggatgacctcgtcccgcagctgccgccttcgacgaagtcccttgaccgccatcttcagccggcctcccgctgacccctctcggcattcattggtccgatgcagctcatcctcatactggtcggtcctgtcccgccgggccgagcgattgttgacgtgccgtcctgcttagtaacgtcagcatcaagcctgcctcccgacggccgctctgttgtgcagccagtcgtcgcttcctatgccgctctcggccagcaagaggatctcgcgggaaagctggtccattattgccctcgcgctactggtgctctcgttctcgatgaccgttggtcgcacttatagttcggagcgatgcagtgctcatctggacccctcactggtcggctttgtctgcttccctcgacctgcacgggaaggcttgctctcgtccaacgcgtcgatgagcgcatcttccactgctgaccctgcccagcatgagggtatgccgaaccttcgatccgcttgaccctgctccagctgatgcggacgctgactggctgcaaacgctggcgaccctggtgcggccccgctaagcggtcgacgcctcctcgctcgcaaaatggccggcgccagagcagagacgtatcatatcgtgccaggagaaaggagaaggcgtcgattaccaccacggttggtagacgagaagacggcttccagttggatcgaacagggcgttcgaaagcgagttgtcgatcggaccaccttcaatgacgtcattcctgccgttcgcttgccggtggatagtatacgcgacgttcgcgagaaggacgtggacggtgccggtgttaacctctggtgcgggatccacgttcagcttatagatattgcgcgcccatttctcgatcttgccgagcgcgtcccgcactactgcgtcaaggcgggcggcagcagtcggcttgcccttcttcgcggccaacttgctttggctgaacggcgtgtcgatgagatttgacgaggtctcgatgtacattccgtcactaagctcttgctccgattggagaacggcggcgagttgcttgccagtcggcgaggactcgagcttctcgactcgagctggcaccggcatctgtacgacgaccggctccttcttcgagtgcagagccagcgtgatcttgaactcgccgttgttttcctggacgtcgtagatgcgggcgaggccgtgaaagccgacggcgagcttgctgccgtcgcggctgagggcgaaacagatcggctcctcatcgagctcgagcaaggccacctcctcgttgacgtcccattgctgaggctcaggcctgggtcggacggccgggatgccgtgagcgtccttgaagccgccttcgatgacgaggtcggccgttgtgatggaggactgcagttggccgtccaccgtcgttgtgatgtcgatgggagctcgggagccgacgacaagcttcacgccgtttcggcggagggcaaagcaagttagctcgtcggtgagcttgggcgaggccgatacctcagcccggaaattgagcttgccggaaggtccgagtagccggtgagccgcatttgttctggagtcgacggcaagtgaccagaccggctcgctgcgaggggaaaagaagagctcgtttctagtaagagccggagccgaagggctcaacgagagacgcaccttgctgtgtcaagtagggccgaatgttaggagaagggcaagattggtatcgagtcgggcgacgggctagcggcagacgtcagcaagctacatacctcccgctctggggggctctggccgctcggcaggaagagcctggtcgacgtcgctgtcgacaggcagactcgagctcgcacggccttccgcaggcgatgcgcagcacttgtcggcccccctgacgtacctcgaggtcgcttggctcgcttcctcccaacacccaccccctcgtccgtcccctcgtccgtctccaacatgttctccaagctctccaacaagctcgacgccaagctcgaccgcttcatgcccagcagcagcggcagcggcccgcaggtcgccctctcgtccggtcagcagcgggagcagctcgacatcagctcaaagaagcagctctaccgctaccgctactggcgcggcatcaacctcggtcagtcctctgctcgagatccagctgaagcctgctgacgagtccttctccttaatcaggctccttgttcacgctagagaaatggatcacgccgcagccgtttgcgaacgccaagaacggtggcgacgccgacttcgacatcgctgcctcggaccggtcgaccgacgagaggcgccaggcgctcgagcaccactgggatagctggatcaccgagggagacttccagtggctcgcctcgcgcggcgtcaacacggttcggctgccgatcagcttctaccatctcgctgggctcgaccggtcgctcctcaagggcaccgagtttgagctgttcgccgacgtctaccagggcgcatgggagcgcatccagcgggtcttcagctgggccgacaagcacggcctcggcgtcctcgtcgacctccatgctgtcccgggaaagcagaacgaggacgcccactcaggcgcgagccatcacgggcccgagctctttgagaagcgcaagtgccaggagcagacagtccgcgtactcgaggctctcgtcggcgccatctgccaggtcgaaaacgtcgtcgggtgcgccgacttgctcggcgttgcatcggctcgccttctcccctttgctgcgctgcctgacctgctgacgcacacgggcgctttggcagactcgagctcatgaacgagcccaagcagcacaagtcgctctgcggctttcaaaagggcacgctcgccaagctgcgtcgcatctgcgggcccgacttcccgctgtgcgtcgaccgcaggctaggtctacgcgcaccgtcagactgaccgctcgaccgctccctcagcgtcgtcggcgactcgtggatgctcggtgccgcgctcaacgactacttccctgaccccaactttaccatcatcgtcggttcctttcctttacaaaacagtgagcgatcgactgatactcttcacctgcaccgacaggacacgcacgtctaccgctgcttcactgtgcgttcgccggcaacgtcgcctgcagttgtagcccgtgctgacttgctacgtccctgcttcagtccgaggacggccgcaaaccggcgcagcagcacgtccgcgagatgcgcgaggggttcctgcacgagatgtcgaaggacgagcagctcaaggccgaccgcggtggcggacgcgtcatcgtcggcgaatggagcggcgcgctcaatccgtgcggatctctccgcctgcgctccccggaaacctagctgacccgttacatcctctccggctcttaagaggcagcatgggtggctcgcacggcggtgaggccgacgagaagacgcgggcattcgtccgagccgaactcgaggtgcgcaacaatcatcatcctgagtcatcgtgtcagtctgaccttccaccggccgccataggtctttgacaagaccacgtcaggctatttctattggacgctcaagaagcaggagggctgggacgctggatggtcgttcgcaaacgcctgccaggccgagattgtccccgccttcctcggccagagggctgcgaacggcaagcaggccgactggaacggcggtctcgatcacgcccgcgaccaggcgctcggttggtgcattcctcttatttaataatagggaaggcagctgatcacctggggcaatctactgcaggctcgcacacggcctattggaacaagacggtgggcggaaacgcgtcgaagatggagaacgaccgctttggcgctggcttcacgactggcgtacgcccgtttgtgcaactcaaatggcatgtcttcttcagctgacgctcatctcgtcgcgccatcgcagtggtccgaccagctccagttccttcagtcgggcttcactcacccccagctgtcggcgtccgagatcccccaagccggcggccagtggaaggtccgccggcgggccgagcatgtcgagcggcgcggcgcgggcgagtgggtctggatctgggagcaggcgttcgaccagggccgggctgcggcgaccgacttttgggctcgggtacgtgtctacctcccggtgcgtgcgcggcggtgaagctgactctttagcgtcgcaggcctgagccctccgacagaaccggccccgactccatctgcctccctctccccgaccggctctctgcccttcatgaccctatccctttctggacgtgagccgagtgacaaataccgaggatggtatacaaagggccggccgagatgacgtctagtgcggagcgagaggctggtagtacaagacaaggacaaggcgcgggagagaaagagccccgcttttggagacgagccgaacttatgcgcccttctcgaagcgctgcttgaactttgcgtactggccgcagatgagctcgttggcgacgagggtgatgaccgtgtggggggcgatgcggacgacgtgggcgaccgagcccttgtagagccctaagaagccctcggccttcaccgtcttccacatgcctggcacgtcagcagggagatcagcgatcggcgcagagagggccagcaggagcagaggccgactgacagtcgatcgggttcttgtagtagaggccgcgtgtccggccgttgacaatctcggttggctggttgtacatacgcgtcagagccgtgtcagccggctgcatgacgatctgtaaagatagcgcgagacgggtggcgtcagatgatttagggggggggcagagaggcagaggcagcggacgcacgcaaacgcagatgccagagacggtcgacgacatgaggtaggtccaggcgctcgtcgcgctcgagtagccgccgtcgacgaggaagttcttcgtaaagtagtagctcggcagctggacctgcggacgcaaacgttgaatgattgggatttagttagcacgctagccagcgacacggcgacgaccaagagtcgaaacaggtggacaaagcagagctgggagacgaaccgacgagcccatgccggtccggaggatggcggcgtcgatgccgcggaacatgccccggacgccctcggcccggtagattgtccgaagggcgtcaaaaccagacttgtactggtgctgggcgccgacagggaggaagggcgagtaggcttgcatgcgggccttgacaaggtagagcgggttgccgagcgaggctgacggacgcgagaaggcaatccgtaacgtcagtctccggtctctcgtctgtgcctgtgtgtcgcccggcaggacgtaccgccaatcatgcccgagccagctccggcagcaaccgagacgccaaacgactggtcgttggggttcttgccgaggaccgacatgcagcctcgccggatgggctcgtagaagcccagccgggagccgttgagagcgatctacgaaggaaagcgtgtccttgtcaggcagcgctcgagatgaactgcaggcgcgacgccggacaaggtcccttgcccaagggcctgcctgcgtcgtgacgcatctgccctgtcgacagacagtatgatctgggttgacgaacctgatagacgtactgcgaaagcagagcgagcgaaagggagacgatgttcagctcgaatcctggcaatgacgccggtcgagcgtggcaaaacacacagccgtgccgagtccgcgctggagcccgcgcaggccctcgttcgcccacgtcttctttgcgacgtcaaaaacggacgagtagacgcgggcgccctttgcgagctcgccctggagctgcaggcgtgtcttgcagacctcggggatgttggcttgaggacgcaagggtaggtcggcgacggagacgcagccgccagagaaggaccatgaggagagatgggagatcaagccgagcgaagatcaagatgcaagcggtgagaccgccatgcaaggcagacgaaaagtaaaggcgagaggggcaacgaggttagcggtcgagccgacggaagcttcggacaagagcgacgaccgagccgacgaacagaaggtaacagccgtacaagccgcgagaccaccgcagatgaagccctcggcggtcgagagcttggggagcgccggagatggcggcgcgacgattgctgatgtcgaggcagcgggtgaggcggcggcggcggccatggctggaggtctgtcgggaggacgaggtcgggaccgggaagggaacgagcgacgcgaggagctgcagaggcgcgacgggctgaacgagagagcgactgggaccgatgcgtaggagcgggcgattgagcgagagagttgtctagagtacgatgctggtcgtgcttttagatgcttgcagaacgagggagaggggatggaacgaaggtcgacgtcgggagcatggcctggcgacgcctccaaaatgggcagagggcgcgcaggccgccggctgccgctcgacgatgaccccggtgggaacagctgacaggcaagacgacctcgctgacagagggaaggacagctggccagcagtgtgaccttctggcagcatgcacaggaccggtcgatggggcaggccgggccgactagaggcccaacggtgacgcttcctgcacgcctcagactcagtcgatcggaagagaggggcgactcgaaaggaggaggcacggcctcgggaaattcgcagaggggtcgtgtatcaagaggagccgccggcacgtgcgaggagcgctgatcaggagaggccaatgaccctcattcttgccaactccctgaccgcttcgaaacggctacgactgactcctattccccatcgcattcagagagctgaccgaagactgcatgactctcctctaccaccagcaatcacctgcacgatgccctctaccacccatctcggcgctctcttcctctctctcggagcagtgtcgcttctgcctgcaacaatggccaagcagatgacggtcatcaactcgtgtgttcgaccttccttgccggctcctccagcgactgacagcagctcctctctttccccagctgcaaccataccagtacgctccggccttttccgatgactgcttcttgacctgacgctcatgtcgctttcgtcttacagtcgcacgtctttcacatcatcggtctgccgggccggtcctgccatatcgacatctgctgattcgcccgcaacacccgcttcacagtggcctgcgctactcggtcagagcgaggcgcctggtgcgccgacaggttgggaagccgcccctgggtcggtcaagacggtcgacgtgccgcacgactggtcagtccccttgtttttccctgcctcctcggacgacgctgacaactcttttccccacaggcttgccggccgtatttgggccagaacgggctgcgacttttccgacccaagcaagccgggggtcctcgcttgcttgacgggcggctgcgagggtggatttgagtgcacggcgtacggcaagccgccttgtgagtcgcactcagcctcactggagaatggccgtggctgacacgggcttgacatcgctggcaacaggcacgctggccgagttcggtctcggcaagcatgccggtgctgacttctacgacctctcgctcgtcgtatgtttagccccgttggccatcttgcaagaagagtgggctgacgcccaccatcatcctcgaccaggacggcttcaacctccctgcggccatcacgcctctcggagggggagcgactggctgcgtcgctccctcctgcgcggccgaccttcttgctggctgcccggctgagcttcaaatggtctgcccctatgctcgctagcgcctgccactcggccgacgttgactaaccggctctcgccctccagaacttcgacgcctcaggccacgcccacggctgcgcctcagcctgcatcgccctcggcaacagcccgaccgactgctgctcaggcgcacacgccacgcccaagacgtgtcctgccgagggcgtccggcaccgggcgcacttcaaagatcggtgcggagaggcgtacagctttgcgtacgatgaccggacgagcttgtttgcgtgtggcggcgagggacggccggccgtccagggttacgagggtgcgtcggtccaaatgagccttcgtacaacttggagcgttgctgctgaccccaatctatattccctttattgcagtcgagttttgcccgacggcctgagtgaggcgttttcgttcaccacaccctgtctctcccagttctccgaacctcggccgagccggtctcgaaccgagttttttctcaccccttccttttgtctacctctccatgagactcttctcttccgaatggcatcacttctacgagcgaatattgatcccgcgacttaaggtcggcggaggacgacgtcttcggcagcgtggctgctgcgcggccgtcctccgaacccaccgcaagccgtcgcctcgtttgccctcggacagcatttctctcctccagccaagtacttgctctctctctgaggtacaacttaaaggagacacatgccctggcatcctcacttctccttcgacctctacgccatcatcggctggtgtattggctttggcctcgccttccgctacatccgccgcccccaagctcaggtgcgaacggccgccgcccctctgcccgaagccccatcgctgatcctaagacccgggccggcctcgatagaagctctcccgcgaacgcatgatgacctcggggacctacgatgacaacgacgaggaggctcggcttgagacggcggacgaggccgaggacgatggcgattcagccgcttggaaggaggccgaggtcgagacgatccgcctgctgataaccggctacgggcccttccgtggctacccgaccgaaaatccatcgacactgacggcccgccatctcgatggtctcgtgctcgagacgcctggcaaggcgactttagacggcagcggtcgtcgacagtcccgcaacacgcgtcgtcggcgggtcgacgttacgttccgctcgctggccgtcacgtacgccgaggtcgactctgtcgtccctccgcttcactctgagcacgcctacgacgctttcattcacgttggcgtggcgagtcgggcaaaggatggcctgcggctcgagcagctggggaggaggggtccgtacgacgcggtcgactctgaaaagcggcactgttcgacggacagcgacgggaagcggactgtacccggctggatggtagagaaggacgaaatcaagtcgtcgctcgatctgccggcgctgcttgcctggctcaagggcgagaaggcggtcgaggtgcgactccaagcctcgaccacaggcgaggcgacttgacagcgactgacgcctctcacttaccgctctacctcatctacctcagcacgtgctcctgtcactcgacgcaggtctctatctctgcgaatacgtctatgccgtgagccttaccgacggccatcacgcgccgactgtcgttaataatccctcaacttccctccgcagacctcgcttaacgccgcccagcaagctgccaagcatcgcgggccgtacacccggcctgcgccctgcctctttgtccatgtgcccgacctccggccggccgacgtgcccccctcggccgacctgccggtatacaccgagcgcgaggtcgccgacgtcctgcgagatgtctgcgcgtgggtcggcggccaggtctgagtagtgctggcatattcgcatgaccgttgccctctgtcctgtttgttgtctgcaaggattgggatagggagattcatgtggggtcatgagcccgcgaccgagatagtttgccggccgcttcggcttcggccgttcggctgcggctgccggacgagcttgacctcccgaccacatcctctgctcgacctgccatcttcccaaacaatctcacctaaaagtccataacagcacccaggtttagtcaatctcgctcctcaggcatggcgtcggagagcaggcggagtgcgggctgacactctcatcatttgcaccgggcaggccctctctccctccgacctcatcaacgcttccgaccatgttcaatcgtcttaagtcactcgtctcgactccgacgagctcagttccctccacaccaggtgaccagacgcctccggcgttcctttcgggcggccagacgtcgcctcagctgccgggaacctttagggcgccgctgcccaagccggagcacctcgccgccctccgcgaagccgtcccctgtgccgagtgcgatagctgcgaggacgacgaggccgaactgacggcaccggacgaggaacactacccgagtttcccgaaaaagttcgacatggaccaggaaagcgagatgctcgggacgtgcagtgcgtccctgctcctccttccacgcccagagctcggagactgcgggcgcaggccggtttggctctacccgttgcacgctgagccgggcaagggccctcgcgccctgctcagcacacgataggactgcccagctgacgtcgaccccttgctcttgtgtccagagccgatgcaccgactcgtgctcacctcgaccgacaagagcgactggccgcacaacgtcgcgagcgacccgcagtcgctcgccttccatctcggctcggtacaccagaagcagctgccgacgccaccgagcaagccgctcgcgcaggctgttgaagggctgagagtcaaggaggagattccaggtgtttacgactcggccgagacggccaagctaacggtcctagcgagcagcgtcgagatggagcaggacgagggcgagacgagcgtccgtcagtgcctgccgtcccctgatctcttctattcggtcggctgaccgtccctgcgctcgcatgcatgcagtcgtcttcccggacttcaaggtcgtccagccgatcccgatctccaaggccggcgcgcaggacctgtacgacaaggcgctgagtccgacggtaggtcggatcggcggcggccctgcggtcgggccgacgctcaagtcgtggatcttgccatacgaggctgtcgtcttgctctgtgcgtcatcctggctctgctaatcgatcctgctagaccccactgaccgtcgtgcctccatgctctccgtcccgcaggctcgcacaagactcgcgacaagcgctgccacatcgccgcacccctcctctcagacgtcatcacgtcgactctcgccctccacgactatacggtcgaccacaagggcagcgcgctgcacgacttacctgcgagtgagcagctcgaggcgctcgagggcggtgaggaggtggttgagggactgctgaggaaggcagctggcagtggggcggacggcttgtcgtcaaagagggaggggagcaaggaggttggcgtgttcaacatctcgcacctcggcgggcatcgctactcgggcgtaatgatcgtgcgttctcgagcccgtgcccttcttccggaacgcatgctcacctcgctgtccctcacgctcttcgcctcgctagatctgcttcccctccggctctatcctctactacggccgcgtgacgcccaaagcgtgcgttgcgatcgtcgagcagacgatcctcaagggcaaggtcctgccggagcatctccgtggcggcgccaacctgacgcggccgagcgggaagacgctgctcgactggtagcggtgcgctgcacatggcatgctttcatctcagttcgaaaattatggagggaaagagagagccgaggggttgacgacggcgccgtgcgatggctggcagagggaggagcgagcgtcgaccgattcagcccgcagcacttcggtcgtcgtcacctccccgaccgccatctcgtttgcccgcaatgccgtccgtctcgtcgctccagccagaggacaaggctcagatcaagtcaatcttgccaaagacctccaagatcctgacggcgaccgtcgcccgcgtcttctatcagcgcggcgaccgctgggcctattcgggcatccagggcgggctctgcctcgtcgtcgacaagcagcgcggcggcgtctggttccgcgtcgtcgacctcctggtacgccgagccttcgcaaggacagctgatgtgatgggaggtagagaagggcgagatcgtgtcgctatctctaccgccacgcctcgtcttgtcgccatctcgccaagctctccggtcgctcggctcgctccatcacgctcccgctgacctccttcttctggctcacctcctgcagggcacacgcggtgtcatctgggaacacgagctccccatctcgagcacctggtcctacaaccaggaccgcggcttcttccactcgttcccgagcgaggtgcgtgcgcttggctctattgcgagggctcgtccagccgctctttgcccccttgatcgcgttgggccgacgtccgtctctgaaggagcacacagctgaccggagctgcccttctgtcttggcaggagacgaacgtcgctttcgtctttgccgacgaggctgaggctggcgacctctacaagaagatccagggccgcggcaagtacagtgcgtgcttagctgtgtccgggcgattgaccgcgcacgcggctctccggctgaccctgcgtacgttcttgtgctggcccaattgtagacaagaagagcaagccgacggtagcggccgcctcgtcgtcgagcggcggcaagaaaaagaagaagggcggcaagatcgacaagagttccatctctggcccggtgcgtgccttgcttggctcgatgaccgtcgtcgaagctgacctcgtactctatcctcgactgtcagtccgagggctcattcaagcatgtcgcccacatgggctatacttcggagcacggcttctcgtcctcgggcgtcgatccgtcctggcaggcgctgctcgaccagctcgggagccagggcatcagccagaagcaaatccaggagaacgagggcttcatccgcgagtttgtccagggacagggaggactaccggtgcgctgttttatgttccctcactctatggaaagcgagctgacttgaccgatctcctggtcgcccagccggcccagccccctcagcccaagaaaggtgcgggggcgtggcaagatgcgaggaggtccggtggactggcaggtgtaccagggagctggtcgagcggtgcgggctgagatggtcgtcgagagcgagggtgcaagaggaggagggaagcaacgtcgtcgtctagtccgtcgtctgcgcggggcgggaccaagagccggccgaggcctcgactccccctacatccgacgcttgattgcacgacgccacacgatcggcgtcacctccgagggaagggaagagtgcgccaggctgttccgcatgttgcttgtacagtgcttgtaccatccgagcctcgccgccgcttgcctcgctgggccgcgacaggcaaggctcgtcggaggcagcgctgcccgatcttagagccgcttgttcgaacaccgaccatccaatctcctctgaactctgctcgccacctcgaccgggctccgtccacaaagccttcactgcaagagtagctagtgaccgactcgagactgcaccctgcacaaaggcaaggtcgtgtcgcagtaaggttgccgtgcgcagcaagccaccgccgcctctgcccgactcacccgccatcgtcccggccggtctcgcctatcctctgaatctccatcgtcgacccagtccatcctctctccagaaagaatatcacatccacctgcccgcctgccatcctctgcaacccggcccggccatggcccagtatcaccccccgccagcagcccagcgcgcccggagcccgcctccgccaccacaacctcatcgcccatcggccgacgacggcagcagcgcctcgtcgctcctctttccctcgttgcccgcatcggctcctgtcgcacgcgctcgcggtcggtcgcaggatgttcgcccggtcggcggtccaggcgcggtcgagcccgaggccgactggtcgctcatcctgcccgccccagcgagccgttcgacgagctaccagagaccgccgccgccgccattgtatgcggcggccgccgggccgtcgatctgtcacgagcatcggcctcgatcaggcgcgttcatgcgcctgccatacgacgaggatggccgaggcgacctccgagctccggccagcgaggttgccgggcgttcacggcctgctctgccagcccgaacggcctcggaacagacgcacggctcgtcgtcgttcgacgagcgcagcaccgacgccgccgacgacttctcctcgctcgactcgacgaccgacgacctcgactcgtccgcctcggaccgcgatctatcgcccggccgctcgccgccagacccgggctacgcgccgttcgccggcagcggcccgctaggaagcaacgcagactcgtcgccctcgccgccgctcgagcccgagctcgtctcgctctcgcgcgtgccgacaatcgtcggcctctcggccgtccgctcgcaggggtcgtttgcgatggcggcctcggtggatacggctggcttcaggccgacctttagcggcgcgcgggccggccgcgagtggagggcgacgcttgtccctcgccgagcaggtccttctcaaggaggacggcctccaattacggtcggcggtacatttgctgacggagcgagcccagcaatctcgacccttggctgtggttggccgttccgctcgccctcggtcgctgcagacgcaccccctctctcggccggcccagacctcctgacgtcgacgtttggcttcctgcgctcgctccttgctatggacgaggcatccctcctgctcctgttcgccgccccgcccatcgtagcggcaagcgagtcggccggctggtccgagaagtcgcctgtcctcgtcgagtcggtcccggtcgctcgcggccgccgaccccggctacggcgtcggttgtcgtccttcgaccctgggtcagacagccggcgagcacttctccttcgcgccgttggccgagtgacgggccagagccagcgcgcggtgaaggcgtgaaggaagatgcccgggctggctgggcgcgtgtacgaagcgaggagcgaggagaaggggatctgtgtgtgttgtcatctgtcgcccgacggggcttgtgttgactgatcatcatgtaatgctaccattgacgacaaagagaggtccaacagcggacttgaaggcgggaatctgaagcagccggaaggagaggcagtcaagagggtcaaaggtcgggcacgctcggagcctggacctcgggctcctcctcgtcgtccgtcaagtgcgaagcgaagctgcatctcgggtcagatcgtgagcaagatcagcatgctactcttgaagctgctcggtcaaggcggcggtcgaccgacgtaatcttgtttccggaagggtcgagcaggctgaactgctcgaagccccagggcttgggctcgcagtgctcgccgccgtgcggggcgtacgagagctcgagcttctgcgcctgaatgtaagtgaaaagcttggcagcctcgccggtctgtacggccgacgatgaacaacggtcagcggctgcacgaccagattcgatgagcgggctggctggaccgacctcgagcaggatgatgacctcgccaaggccgaccgggaaactctcggccgacggctcgcgcatgtacaggttgacgatagcctgatggcccgcaaagatcgagagaaatccgtcgtgcttccccccaatcttgaagcccagcctagagacgagaggccatcagctcggcggaaggagagacggtcggaagcaaggccggcgtagaggaaccgacctcgtccaccacgcaaggctggcgtcgacgctctcgcagcgcaggaccgggatcggcttgatgtagcgcagctcgggcggctgtgaggaggacgacattgtacgtcgagacggatggagtcgaaggagagcaggtgcacgtcgtgagagatggccaactcagctgatgagctcgtcccaagcggtcgacatgcgcagcggcaccagctggcagagacgacgccagcgctcggaccttcctcagactctacctgagccagcatcaagatccaggcaaaggacagcatgcgtccatcgacgctgctgcctccagccgagagcatgaccaggcgtcagcctgagcgtgcgtcgtcgcttggctcgcgccgcttcggccgatgagaccttatttctgcattcggctctcggcgtccgagccggcctcctccgtcgggcgtttgctccagagccctatagctcgcagcccttctctctctcctgactctcacctcacctgacactacctcgagaagagccaacgacactcggacctgccttcccgccccgttcggtcgtctccacccgcctggcctccctcccccgccgatggcagccgatccgcacgaccgctcgccgaccgcggccaacgccgagacgagcgtcgccgctacctcggtcgacgagcggcatgctcacttcgagctcgacgtcggctcgccccgcgcaattgctgccagcccaccgccttcaacgacgctctcggagaaggagcgccctccggcggacgcctcccaggcgacgctcacacctttcgccgagctcggaggcagtacgtcagcagggacgcccgtcgccgccgtccaacccaagcccgagtcgacagtgaagccgccactgacggccgtcgacattgagcacgtctacgtcgacaacgacccgcgcgaatggagccttcgcaagaaatacttcgtgacgttcatcgtctcgatcggcgccttgacgccgacgctggcagcctcgtgagttagccctgctcgtcgcctgcacggtgcgctcagctgattgtcgtgcgtatcgtcgcagcatctacaacccggcctttgatcagctccgcgaggagctgagggcgaccgagaccgagctcgcgctgtcgctctcactcttcatcctgttccaggtacgtcatccccacaactttcatcctctcaccctgagctgactcttgactgctatagggcggtatgcccgtcttctggtcggctgtcgccgagatcatcggccgcaagccagtctacctgatcgcgcagacgatcttcatcatcggcacgcttatttgctcgcgcgcaaactcgatgccgctcctgatcgtcatgcggatcgtccaggtgggtcgctccttgactggcactgaaatcctcgctcattggctaaatcatgtattctacaggcctgcggatcatctgccgtccttgcgctcggagctggcacgctcgcaggtgcgtctttctcctcctgatttggtctctccgcctccgctgacggcccctcgctcgtgcacccttagacatgtacgaggtccgcgagcgcggcaagttcatgggctactactacggcgtccctctgattggacccgcgatcggacctctttgtgggtgccttttgtcgcacgatcatcagggagacggtgctgaccaccgaacgtcccgttgcagtcggtggtgcgctcaccaaagcgtcatcgtggcgggcgaccttctactttattgcaggtctggctgggctgcagatggtgcgcaccttgaatctgttcgacgagcgagtggaccgtctgaccatccctttaccggcctcgcagatcggcttcatcatctaccccgatacctggcgcaaggagcgctctttggcttaccagatcgccgtcaaacgctccgtcgccagggccttccacgcacaagaagtcgccgaggcgaagcggaaacggaaggaggccaagggactcaagtcaagcgacccgacacccgcaccgacccgcgccccgtcacccttgagtgaccaccaccgtcacgtcgagatcgaggtcaagaaggcgcctggtcccggtcaacgtcgctggtgggtcgttggcaagcggctgccgccaaaggaggcgacgggcgagtttaaggtctcgatcaccgacattaaccccttgcggccggccatgtcgatcctccggagcccggtcaatttcgcaatcatcgtcagctcgggcatcctcttcgcctcgcagtacacgatcgccttcaccagcgccataaccttcagcgctgcgccctactcgtacggtacgtgtcttcaaacataatgttgcgccgctcgaccctgacaaagcggcttgtcatagacgcgctgcacgtcggtctcgtccttttctccttcggcgccggcaacattgtgtaagtcacttcttctcgacctcttgctgctggttctcacgtctgaccgactgtcctgtctcgcagcgggtccgttctcggcggccgactctctgactatgtcctcgctaagttgaagaagcgcaacggcggcgtcagtcagcctgaggttcgtctcctcaaccagcgcgcttggcgtcataggcaaagctctgacttgacgacctgtctctccttgcagatgcggctcaaggccatgtttccttcgatgccgttcatgatcgcgtctttcctggccttcgcctggacgagcgaggagaaggtcagctcgacttgaacgattcgactcaaagaggctgtgctgaccccgcgcctcggaccgcagaccaacatcgctggcccggtcgtctgcctgttttttgcgggcagcaacctgatggtcatatacagcagcgtcctgagctatctcgtcgacgcaaacgtcggacgctcatcggttcgttcagcccgtccgtcctcaaattcacacgactaagctcactccaggcaccaatgactctttttgacagagcgccgtcgcctgcaacagtctcttccgcgggttgtttgccttcatcatgtctgagattgcgctgccgatccgtaacggcatcggcgacggcggcctttacacgctctttgccggcctgctcgcgtgcagctcggcaacctttgtcttcctcgcccatcgagggacggcgctccgagagagggcggtgcgcgcgacgtgatctgtagactttagctctactatctgtatgtattaatgtctcttgcttctggcgagctgagagatcggaggaagagagccatctaagtgcaggaggcggatgcggaagacgacaatgaacaggcaaaatctagatcgagtacaagaggcgagcaaaagcagtggacgaggttgattccggacctaggctgcgtcgttccagacccagccgcagtccttctcgagccgacgcttgagctcggaaacgcccttctggccgagcgcgaccgaagcaggcatgacaccgccctcgaccggcacatactcgcccttcataaggatgagagcgatctcggtcagggcgactgtcggagcgcaccaggtcagctgcggcactcgcgggagtcgtcgcgccagcgactcactcatttcgggctgttcgaccgactctgggagggtgagactcaggccctgcttgcttcctgcctcctcttttcggcacgtgatgtgcagcggcagcgtggccgtgacgcgctcggtcatgcgaaggctgtgaacgagaacggggtggtcagtgctgtaggcagagggtgcgccatctcgctaggactcacaccggagcgaagatccaggagcacagagagacccatgcagcgcacagggtcgagagcgcgtcgaaaacggcaccctcggcatcgttctctgcgtagcggtacttgttgcctgccgcgcgctgcgccatccggctgacgacggtgtgatacggcgccgtcactggagcaagagaagagctgggagggtcagcaggacttcgaaagcctcaacgagcgatggggctgacgggatgaggtctgcaggatgggctcgtcctcgcggtcccagacgttccgaatgcgcgcgttctggccattcgcaccgtcctcattggaagggaagaggatgccacgctgaccgttccactcctgtcggacaatgtgcgactcgatggcagcgtccaggaggccaacgagtggcgaatcgaacgtcgtcgtgagagactgggtcgccgacgtcgggcgcagcagctgggcagtgatgtcactggcgggaggcgagggtcagctgcaggctctccctggggagtctttaaggaggtctgcgcgcacatcgacagcgtcaaaaggtcgcaggtcggcacaatctttgagccagtcttggcggcggcaaagtcccagtgatagaggaggctcttgagcaggaccggcgagcgctgcaaggaggaaggcaagagagcattgatgagcccttcaagcccgcttccagtgagtgtacaatgccgactgaccgtatccgacagaagatggatcccgagcgagatggccgctctggaggagggagacgaggtgacgaaaggtggacgagggcagcaagcagcgaacgcaggcagtcaaggagctgctcgtcagctcagccctcgtggtcgatccctcgacctctcgcaggcgacgcactcgacaagcttccagtcgggctcgccgccgagacaaaggactacgctgcctttgccagccttgtcggagagctgctgggtccagctgaggccgccggccggccggccgaggatggcgtagggagtcgaggtcaggcacgcctggaggtaggccgaccaggccgagttgattgacgagaaggacgacggcgaggcgtcaaagacgagcagcgtgcgaggaggcgaggcatcggacgacatggcaggcaagagagtagaagggatagggtgcgagggaggagtgactgtcgagaggcagacgccccgtcgatactcggggaccgccctttcggcaggcggtgatcaactacttaccggacccaacaagcgccggtgcggcgagcgctcacagcacgttgggcaggaggtgcgcataggtcataggttacaacagcaatacgaggggcatctgggcagctaatcttgtcttcaaggttcgatagctctctgcgctcgagggcaagccgaggcaaccgcagccgacgcggacagcttacgccgccgacgctttagcccagtcgatggcgagcaggtcggcacagcgctcggcctggcgagaatcgcatgcgtcagccggggcacgtcgcaaggaaaaggagaatgcgagacgtacgactgcgacgacagccgcttgcgtatggcacgagaggcctgtgggaaagacgctcgcgtcggcgacccgtaggccttggacgcctcggatccggagctgctcatcgaggacgccgagcgggttgctcgcggtcgagatgggaagggtcgaggtcatatggtctggacgaaagagcgatcagtcagtctgtgatcgaaggcggaagagcacgctcgagccagcgactcacatgcgttggtcgcccactttcgagcgtaggctccaagctcggcgtcactgacagagagctcggagccgctcttgtcgaagaagggattgttcttgccgtgaggcttgacggcatagccgtcgcgggccatctgctggacgacggccttggcaagcttcatgccatgaactaggatgtcgacgtctgaggcctcggagactggaacgcatgaagggcaggaagttgtcaggatgattaacggcctcattcgtcttgtgtttgcaaagagcgactcacggaaacgaggatcacattccggcagctgccgggggtcggacgacttgagcctgatgacgcccgtcgactttggccggacgaggagcacgattggctgcacggcgaggagcaaggttagcaagtttagcactggatgctgtcgccgagttatcagccgcaccgtgaagtagcccttgctcttatcgaagctgcccttgcgaaggtctcgcggcagcccgtctggcttaccgtcgtccatgctcgagtgaaaacggtagggcatcggcaggatctcgatgtttgggatctcgtcaacgtcgcgcgggtcggcatagatcggtgcgtcgagtgtgtactttgatccggtggcgagaatagcagtaacattcttggcggccgccatgatggatgcctgcgagccttggctgtgatcggaggcgggtgtcagacgacgagcaagcgatgacagggacgggcgagcgcacgcacaaggtgaaggcgcccgtccgggactttgcaaaggtcgccacctggccagtggcgtgtagcgttgatgtctcaagtcgatccagtgaatcagacgacctgcatcgtgaggtcgagcatcagtgacgctggctgcaaggtgcaggcagcttcagaggcaaggacgcacggaaccgagtatggcaggtagacgcccaggtgatccgacaggcccttgccgacgcctggcagatcaacctcacatgctatgccgtgctgaacgagctcctccttaggtccgatgcctgacagcaggagaatttgaggcgagaagacggctcctgctgcgaggacgacctcctgctgcgcccgagcgaagagcggggcgtcgacatgcttcgagctgtccgactcgaaccagacgccgacgcagcgtcccgtgttgtcgatttcgagccggcggacgagcgcatccgtgccgaccttgaggcccggaccgaaaccgggtcgctcctccgtcatgaggaagtcctcaaagacgttggtccgccggccgtactcgccggtgatctcgtgaacggcaatcgcggtcgcacttgcgacgggatcgttcagcgactggacgagcgggatgccgaactctttcgtcgcgttgacgaaggcgcttgccgacgcgtacgttatgcgcgggggcgacgtcgtccgccacgggccggcctcgcccgagaagccctcggacgacggcgtgccggccgacggctcaaacagcagcggatggcgcgtgtgggactgcgagcgcttgaagagtggtagcagggcatcgtacgaccacgagggcaggtcgagccgggttgcccagtcgtcaaactcggccggcaggccgcgcgtgtagatcgagctgttgaaagtcgtcgtcccgccgagaatcttgccgccgacgagcgagcacgtccggccctcgagaccaggctgagggaccgtcgggattgacagcgccttgtctggtgcgggtcgaggagggaggggcgtcagcttgccaggctgcagcgcgttgtggcgggggaacagacaggggaggccgcaccctcgtccatctgccaggcagtcgagagcaacggcacgcctgccgtccatccgcggacggccacgcctcgctcgagcaggaggacctttggagagccctccaagagcgacagcctggaagccagcgcacagccggccgtccctccaccgacctgccgacggagggatcagaagccacgcgtcagccggcgacaggaggagaggcgacgggcagcgacgccgtcggacgcacgatgatgaagtcatagaggtggtttgcgtcgatcgtggtgttgctcgtcgagccgagcgagctcagcgggtgaacagggagcttgggcgacatccttggcttacaacgttgttgacgagaaggaggaaggacgtcgggctgagctcgacatccaatgttcggccgccggccgccgggtcggctgcgcgcagtctccttaatcgttcgacgcggcagcatgcgtactcgcagagttgcctctccacggtacgtgcaaactgatcgtatcgcacaggctagggctacagttttgaaattgagactgaccgccgtcagacggccgttacatgctggagatgatacgtctcgccgagcagcgtctttgtgacgaccatcaggcggtcgagccggccgacgatagcaaacacggtcgagcagccaatcgcaaagcgcatgtactcctcgctctcgagcgtcgaagccgtcaggtaggtcggcagggagccgtccggatgcgtcttttcgtgatggacgtcagcgtggctctcgtggtcgctgtcggcgtggccatcctccgattcgtttcgagcatagtagtcgccggcgagcaccttgaggccataggcgctgcgctcgagatagcgttcgacaaggctacgattgacagagcaagaggtgtcagtctgcggtgagcctttggagggggacggagagctacgcacgggcaaggcgtgatctgcggaaggggcgaggccgaccggaggcaggtgcagcagagcgagaagacggcgagcacgtctcccatctgtgcggatgagggctcaggtcaatctgtgaccggcggaaggcagaacggagcgcacgttgcgcttacgaaacgcgtatcattcagctgcgtccgcttgagcagagcccgtcgccaaggggggttcatcgttgagacgatgaactggagctgcgagaggagggcagcgaggtcgatgagggtcgtccggagggccgtgtagcgggcctcaggccaagtgccgcggagggagatctcgtagccgaccgatgcgtgacgagcgccgagcgagatgagcttgcccttgactagcggttgtcgggaaggagtcagtttgccgccagcacgagatagaggagtgaggccttcgacgcactggccatgaagttggactctatcctttgctgctctcgcatatcatcgggatgtcggttgcccgcctcgctgatgattgagcagaggccgtcgccgagcgtgccgatgatgttgctgtacgagtgccggatcgactgcttgcccgagctcacaggcggcagccaggaccagatccaggcggccgagatcccaatcatgacgttgaggaagctgagccatgtggggagagcggccgtcagcagcattctcagatgagctcgcagtctgagcagcggatggacacaccggcgccaggtgacgtcccagccgtacgaggcgtttgtcagcatgccgagcgacgagttgccgttctgccagccgtaaccgatgatgaggccgagcgagaccgagaagaggatcttggtcaaaggcggcgagggggcgaagagccggaagatgaaaacgcaggtgaagccgacggcggttgctgcggcgatgccgaacgggttgccagacgtgttgccgggcgcgccgatgacccagatgagaaggcccagagcacaaccccagaacgtcgcaaagacacgggcgacaaaggcgagggcggtctcctgtaaagttgccgaagcatgttagcccgacgcaagacagcctttagacggtgaagacgcacgccagagtaaagtgcaagagtcagctgcgccatgatgatgacccatagactgcagggcagaggcggccgagtcagtcatctactgagctcagggcagcgttaagaaagcgtcgcgcacctccggttcttgtaagcgaattctgcctagagggagctgaacgggtcagcagggtcggcgctagacgtgcctgacgaagcagctcaccgtctgcggggtccaggccggcgtggcgacgaggacggtgagcacgcaacttttcatggcgaagaggccctgggttgacgtgagcatgccgccgagccgatgaatctggacgagcgccgcgaagagcgcgttggaaggctccatgctgtcggggtcacgtcgctgcgtgccgttcatcgagtcttgtctcggctgaaggccctggatacggtcgggatcctcttcaccaaagggctggccgtcgctctcgtcttggccacgcgtcggtaggaagcgggaccagttgagcagcggcgtcctgcgaggcggccagaggatgatcgaacgatcagcgacccgagcccggcttcctctctagctgacgccgtcgtgactgaccagaggcgctgcttcttacgcttgagctcgatcgagcgctgctcgtcgaccagccggaggacctcgttcgaaaaggcgatctggaagagaggaaggaatcttcagacaaggaggagaggcaaggggacgagtctgcttacaatgtgaaactgcgcagcgaagcaccaaaagagctgacggtgcggcattctccgctggtcggcatcgtcgggcgctgggtgcgtcgggtcaaagagatgctgcaaagtcgaggccatcagcggttgcgaaagactgagctcgtcgtgaacgatggacgtactttgtagggctcgatgacctcgagcctctcggtcgtgttgaactcggcgatcgtcttccgcaatcgctcgacgacgcgctcgttctcggcctcgaaggccggccctcgtctgcggtccttcttgcgcgtcataaaggaccggtcgccgttgatgcgggcgttccaggccgaggcgtgcttcatcgtgtcctcgagtgcatggaggaggggtaggcacgagtgggcgagcagctggagctgatggtggagctgctcgacctcgtgatgcgaaagcgtgtgctcgaggttcatgtacctgcaaggaagacgtcgtcagctgtgtggcgagctgacgccaagatgaggcaacgcaccgttgcgattcgaagaggccgaccggctcctgcactctgcgcagtttctctaacaggctgtgactgtgcgtcttttgatgaaagtggtgatggctcggcgacgagtgatgcgaggatcggctgcgaagcatcggaaaatttagcttgcggtcccgcttgcgcgcacgctcgtgcgcgagcaagtggacgtggtgatccgagtgggcgacggagccgtcgaggccgatgccagccttgtgcaggaccgactgcaggccaggcgtcgactgcccgctctgcagcggtggctcgtctgaagagtggcgaccgacgccatgagtcggcagggtgacgtgttcgcccgcaggactggtcggggcgctcagctcttcgtccgagtgagcgggcgagtggacgggcgatgagggccgcgacccgccgtgttccgactgggcgtagaccgagttggcccgggtcgagagggcctcgttgatgccgtcctgctgcgactggttgagcgtcttacgaacttggaacgccgtcgagtcgagcgcgtcatgcaagagtgcgcttttgaggatgtcgaagaagaagccgactgtcgagggagagagcaagcgggcgtcaatcaggcgcacaagcagcagacggaggctagcgacactcacgaccgccggcacgcagattgacgtccctggccctgccaccgagtcgttctagatcgcgagcgccgacgcgaccccaggagatgtccatgccaagactgccctcgagacccttcatcgcaacgaggccggtcgtcgagctcttaacgcggagctccttgatcttcttgccggcgtcgatccagtcgttcaggctggcctcgccttcgccggccgagtcgaagagggcaacaatcagcctgaccgactcctcaagcgggtcgagtacggcagtgacagtgcccaaaaaggcaaacgaggccgacgaggggaagacaacgatcgagagcagcatcgagacgccgatctggatgcacatcggcaggaagaagacgagaccactgtcaagaagacaggtcggtgtcagccaacgagtgcatgcgcgcgatcgtctcactctgggcgcacctcgtgtagtaaggataaggaaagagcgggctgcgagcgcccaagtggatagccgtcagcagcagaagctcgcgcgtgtcgtcgtaggactcacattagggtcaaggcgacgtcgactggaggcagcacggctcgctcagctgacatttctgtggcaggaaggtattgcacagagtctacgcacgttgaatgcaagcgaggacgcagggcagcgtgatcggtgagggtgcggtccgcactttgagccagcactgtgcgagcgagagccagatcagctccggcagcaaccgagagcattcaagtctgctgcttacgcacgaagaagccggcaccaacgccgagaaagacggcgcagacgatcgagactcttggctcgaggtaggcgccgctgaagatctgaaggaggaccgacactgaacgttagaatgaggcggttccagagcaacgtatgagagcaactgaccagctctcgactagcctcggcctgagggatctcgttcgtccggattgcgttgcagatggcggcggcgatgcagacataggcccaggcgatcgcaccaaactgccgtcggacggagacgaatttagcttcagtactctttgcccgcacgcgtcaggaaagaacgaacgaggatggtgaagaaatgcagttcagcattctgaacaaacgacttgtcgggcggctgcataaaggctgaaagccgagcaagcagacgggggtcagacaggggctgaggcggcctcaaagaaagggggggtcgcaccgattactaggacgaagaagctggcctgccccagcatcgtctcggtctccgagatgatgatgaagagcatgccgatccaggcctgtcgaggggagaaagaggaggtcaggtgacgtgactggcgcgcagtacgggcgagagcaggcggctcgactgaccgaaagcgtgcaccggaagaggaccttaaggttgctccgcttcgacagcgccgggccgacccagtcgagcgggaaaactgggttgtgtacgacctggtgtaggagccggccgaacgtgcccttggccggagcagatttctcggctttggtcttgcgctgcttctcggtcgggccgctgccgtcggcgagggtcgccggacgcgactcgtagttctctggccggcggtcagagtagtggctcctcggccgaagacgggctccgccatcagccgaccgtgtcgagggctgagggccggcactcttggtcgacgctggccgactcttctgctgctcgcatgcgaggacgtcgcgccggctgccatgcgcggcgacagctggcgacgacccatcgtgcgtgacgtcggagtcgtccgtcgggtcgtcgagcgtgaatgtcggtcggagatgcgagtaccgagcgctagcagtcgacggcagcggcgggctccctagaggagagggtgcaggggacgacgatggagggatggcgctttccggagcggcgatactcttgctcgacggatgagcagagctgagggctgaggctgtcgcggcggggcctagcggcgagaggacgtgctgccgctcagacgccatctgcagaagggaagccagaggctggaggaagggccgctggagagatctgcctggcttcaggccagtctatgaaggcggcgaggttgggagagaatgggatgcttgcgagctcgagctgagggtgcctgcctgcccaacccgcggcagcagctgccgcaacgaggggtccccacacccgccctgtcaagccaacctcggacggcgacgacttctcccaccgtccctggagtcaacggccaacgactgcaggagttgtgcgtgcagggagcctgtcgttgtctcccgctgtagccggtccgactcatgctgtgatgctggtgagggttgcgccgcttgacagggccgaccgcggccgcagaaccgctcgctcgggtgcgtcactcctctcacgcgaagaggcttgcgaactcgattcttggccggcggccgagccgacgacgacggccagacacgcggcgaagcgacagcacgtcgcaaccctcaccctttcaagaaaaaggacacacgggactgcctgctgcctgccaacgatcaccctcaacccccttcccgaagtgacgaacgcaacgacctgcagctttctccgccagatgctgctctcctccctcgccctcgcggccgtccctttcctcgcgtcggtcgcccaggccgcaccggcagccggcgtcgtcctcaagcgtgaggccctcgtccagagcatcgaggccgacctccgagctcgtggctggaccaatgaccgcgtcaatgacctagaggttgaggctttgaaggccgacatcctcgccctcgccgccgagaagcggctgttcggctggggcgaggacgactcatccgacgagggatacgcgcccgtcaagacgacgtgtgagcccaacacggtctttgtccgcgccgccgactcgtacgtttcggctcgatagggagggcggcccgctcgggctgggcagggagctgatcagccgccgcctcttgcttccgcgcagtctcaacgaggtcgagaaggcccacgtccagactcgtctcaacccgaaccgcttcctgcggtacctctcgtcgatcggcgtcgagccgtcggcgctcaatctcaacctgacgccgagctcgtcgaccaactcgacgcccaacgtcggtctaagctactcgggcggcggatatcgcgcgatggtgaacggtggcggcaacttgtcagtcctttcgacagctaccttctgcaagagagaggcgcgaagtatgcgaagggcctaggctgacataggtctgcacatttgctgcagctacggtctcgactcgcgcaactcggaggcagtcgccgccggcacgggcgagattggccagctcgcgacgtacatcaccggcctctcgggcggcagctggatggttggctcgatgatgtcgtggtcggtcgacggcaacgtctcgatgctcgagatcgcccaaaagcagtggaacctcagcagcaacttggtcatcccggacggtagcgtcattgacaaggccaagtactttggcgacctgctcgctgcagtgggaaagaaaaaggacgagggctttgccggccagatcaccgactattgttagtctctctcctttgcgtcccttctcttctttacgcgagaaagccactgacgccttagctcgccctgcttgtagggggcctggcgctgtccgaccatctcttcccgccgcagtacggcctgacccaaacacccaacctgaccatgtcggacctcaaaggcgtcaacgcggaggatgtgccgtaccccatcatcatcgctgccgagcgcgaggagggcgagattgtgcgtcttcttcaatgagcaatgagcaagtgtgtgctggggactgaccattgacttgccattgactttacagagcgtcgccgagaacgctaccgtctgggagtttacgtatgaagaattcggaacctggggctttggtggcggtgtctcgcgcagccagtcgcgtaacgccggcggcgccttcaccccgacccgctacctcggcacggccctcaataacggcacgcccaactcgactgacgagaagaagtgctacactggcttcgacaacctcggctttgttgtcggaacatcgtcgactctctgtgagtcccggcctcggaaacctcggcaccgcaactcgaccgctgaagctgacatcttgccgcgacagtcaacgccgcctacgcctcgctcgccaactcgtctggcgaaagtctgattgccagcgccgtcgagtcgattctcggtgccgtcagcaaatcaggcaacgacatcgcctcgtaccccaaccccttcatcggttggcagccagagaccaacccggccgccaacttccccgagctcacgctcgtcgacgccggcctcacgaaccaaaacatcccctagctcgtccccttctgggcttgcggccatgcactcgcttttgcccttgaccctgacctttccgccgcttcacgtcccgcagcgagcccctgctcatcccgatccgaggcgtcgacgcgatcctgtcgttcgacaactcggccgacacgacctactcgtggccgaacggctctgctccgacgacgacctaccggcggcttcagacgctcaccgatgagctcggcatcgacccgctcttcccgcagatgccggccaacacaaactcgtggatcaacctgggcctgaacacgcggccgactttctttggctgcgacgccaacgcccggcccaacacgacgacgccgctcgtcatctatgtcccgaactacccctggtcgacgtttagcaacgtctcgacctaccagctcgagtgggagcaggaacaggtcgactcggtattcatgaacggtaaggccttcttgggacgagtggcccgtcctagttacgagtccgtgactgaccatggcctcctcatctgcagccgtccgctccatcacgctcaacgacacggtcgacggctggtcgacctgcctcgcttgtgcgctcgccgaccgcgccgtcgctcgcagtggccaggagcgcagccaggtctgccgcgactgctttggtcggtggtgctggaacggcactatcggtgcgtctgacctcgtctctcccctttagcgaacccactcgctaaagcctctcgccttcgctgctctagacgactcggagccggccggcgagtacgagccgattccgggcacgctcccgaccttcctctccagcctcggcgcgaccgccaaggccgttgcgagcccagcggtcacgccctcgaccagctctggctcaacgaacggcaacggcggcagcgcaggcttcaccacggcctcggtcggcagcctcggcgtcgcctttgccgtcgtcctctcgtcgaccgttgcgctcctcgcctaagcggccgactgcgtcttcatctcaaatcttctcttccgcatcttgtcctccatgtctgccattaatgccgttcgttcaagacccgacgtgatagaaatgtgtacgctcgccttcgtacgcttgaccaagcataccgccgccgctgcgtcatgctgcgaggcgcgtcggcgcagccacccgaccagcctgctgcagctgcaacgccttgccagcgtcgaggatgccgtcggccatttctgcgcgatagatgaggacctctctggctactgagcggctcgcctgcaagtagcggaggctgccggcggccgaggagggacgtcgtagcacctcggcagggcgagctcgctcgctccaacgcagccacctcctccggctctcccttcctgggttgaagtggtcccgcacgtaaccagctctttcagcacgcactcggagccgctcgaccatcaccccctttcctcgccggtcgctcattgacctccctatggcgcctgagccgaacgatgacgaggagaggaagccgccgctagtggctgtcccgctcgttgcagcctgcgtcgcgccgctcgtccgtcggctcccccccgaagccactaccgttcaatcccgagctgaccatcctttgtcgctccagatcacgcttctcgacattcctgccttgactcaacgctggtactgtgcgtcgacgggctcgacctcctgtggtatcaggggcgggcgccgtcaagctcgccccaagcccgccgcgtcgagtgtcgcatacgcagctgaccgtcgctgacctgaggctaccctctgctcgctcgccatccagacgtcaatggccttcctaccgacgacccagtcgagtcggtcgtgctcagtgcagtgtcactcggactctgtttcctcggcaacgccctcctcgtcctgcgcttctcgtccaacgcgccgtcggtccgagcctttgtcgttgaggcgcccctagtctgcttctggatcaagacggccgtcgaggtcgccaaccttgcagtctatgcgcgtacatcccatttcagacagcttggctgcttctgcttcagtcgaacctgacaagtctcactgtacaacgccttcaggcgccaactcacggccagacaattacgtgctcggccaagccttctgggcggccatcttctcctgtggactctctggcatcgtttcggtcctcctcctcgtccactttgttgtccagcggcagcagaagtacaaagactcgatcaagcaccgcgtcgacggccggcacttcctcctctcggtcaccgcctttgtcgtcgtcattgccttgcatgccctcgccttcagcgagatcgagggctacgtcttctgggacggcgtctttgctgccatcgtcacctgcacgacaatcggcttcggcgacttggcacctcggcatgtctcgaccaagatcttgctcttcgtcttcttcgccgtcgacgtcgcgctcttgggaaacatggtgcgtccgtgtcgctaggcctcccttctttccagctgacctcaatctcgctcgtccgccccgtagattagcatgatcgtaggctgtgcgcttttcctccctgattcgtgcgggcctcctctgcatacgcggctgacagacggacgagtcctcgcagacatcggcgaatccagggtccgccggcacaaggtgcggtgagtgccttttcacatggctgggcctatccacaggctcggctaatcgtctcgccctacagcatgcaaggcctcttaatgtcccgccacggacgctcggtcgacaagcagaaagagtggggcctcgtcgaagagctcgactttctcgacgggatgcagaagcgcgagcgcgacgcttcccagatttacgacctcgtgcgccagacgctcacccgctttgggaacagacaatagtaggctgacgccgctcggctataccttcgcagattgtctcgctcaccacattcgtcgtcttctcggtcgtcggagcggccattttccagcattctgaacagtattggagcgtcagtaacggtcgttgtgctgcaactcttgtagggttccgccggactgacaagcgactgctgtttatttctctgcagtttggcgatgcactttactttgtcctcgtattcagcttcacaatcggtccgtcatcattcgaccgttacctcagtcgcgctggctctgaccttcaacatttgaactccaggctttggtgacctcgtaccaacgtcgcccctctcgcgcgtcttcttcgtcctgtaagttctcgtggcggtcggctcaacttgacctgcgctcggctgaccctctctgcccgatctttatccgctagttacgccctgatcgccggtctgtatcgcgattccgtgcatcgcgtcgctccctgtcagctctgaaagctttagagagtgctgacacaatcggctgtgctggatcttcagtccctgtcgttgcttcgttcgctgtcagtttgagctcaccgtcgctccaccgttcagcttcgccgactgaccctattctgctctgcgccttgtcctcgtttcagacccagacggtgaccaccctcgtcgaacaattctcgaaacagtcactgtcggccgcgcacgtcgcccgcaagaagcacctccggcgcgggcccgacgccaatcctgcggacgaggaggaggccgaggctcaggaggaggaaagcgaaggattgaaagcgcaccacttttttgtctggggtaagtggaacgagctcaagaggagctcaaaggaccaagcccagcgctcggcagagcagcggcgacaagacgaggcaaagctcgcaagcgaggcgctcgaactgtgggtcgatgaagctgttagcttgcatcggcggccgagctgacccccccgatcgtctcttcattgccagcgcgtgccaactcgagtcgcttagccggtgcatgctcatatctgccctcgggtcgggcaaggcccggaacttgctgcgcgccgaccggcatatccagaggaggttagttgagaccggcggactggccggtccgatccaaactgtgccgctgaccatgagattttgcatctgatcgcagagacatcaaggctgccggtggaggggagaagatgactgagctgtgggcgaaggaggaccagtctgtccctcgcccttgacctggcgcctcggctagcacgaccgctgaccgcggcccccttcttcaagatgcatcggcaactcgtctgatgatcttatgggcagcatcaacgagtaccgtcagacgtttgctcaccttctcgctgtcggagcaaagctgaaggaactcgagggtgcgtccgaatctaccctgccgacctttgtctcgcgactgacaccctctccccacctttacgcaggcgtcaatcgcaaagccttccttcgcgtccgactcgatgatgatgatgagaaggacaaccagacgctcggcaagaacgcccagacccgagccgacatcgagggcgacgacaaggacgacgacgtctcgtcgaaccatagccgagcagaggaggagatggagatgatggacgagatgggctcgatcgacgtccagaacgaggacggcgaggcggtcaaggtcgacgtcaaggagaagaaggagcgcgacgaggccaagcaggagcgggtggaaaagcgcgagaagaggaaagagaaacagcagaaaaaggagaaggagcaaaagaccgacgagacctgaagcctgccaacactagagtgatgtacgatcccttagaagccgagtcgccgaccgactgtcagctgtggttcgtcatgtgatcgcgcagctacttgccaaaggagaagccacccgagccgccgcccccgaacgagaacgacgccttcgctgcagcaggcgccgcaccgtcggcaggctttgcaccgaaagaaaatggcgccggcaccgctccgggcgtgttggcccctccaaaggtaggcgcagcgggcgaggctgccggcgtcgttgaggcgccgaaggagaactttggcgcagaggacgagctgccaccgccaaaggaggggaccgcagcgccgaaggacggggccgaagacgaggcgttgctgccgaaagcgaacgacggggccggcgctgctgttgccgccggtatcgagggcgtggcaggcgtcgtcgaagctgctccgaacgagaaggagggttgcgtgctcaacgtcggtttgtcaggcgcccgttgagtgccgccagcgccgaatgatgatgatgcggtagcggcgggtggagcgacggacggcgcgggcgagggagcagagggcgcgccgaagctgaatgacggcgccttgggcgcctcagccggcgtgctcggggccggcgtagtcgacgctgagggcgctgcaaaagcaaaggcgggcgctttggccacaatgggctgaggcgctggaggagccacaggcgtggccgcagccggcggcgcgccgaaagaaaaggtggctttgggcgccgcagctggggcgggtgcgtcggtcggcttggctggcgcaccgaagctgaacccgctgctcgccggcttcgggacctcggcagccggctgctgagacgacgccgcgggtttggcgccgaaaagttcggaggacggctgagcaggcgctgaagaggtggacgcggcgaacgggttggcagcgccggctggcggcttgggggtcggtgcgagcgtcggcgtgggcgagtccttggacggcccgccgaacgagaagggcgagcccgacacggatgccggtgttgacgccgacgagctagccacgggctgagtgggtgccggtgtcggtgccggtgcgagagccggtgcgggcttgagcaccgcagcagccttcttttcctcttcgaccttgcgcgcgagttcctcatcgagccgattctgctcctcggcctccttggcttgccgggtgaggctcgcgctgaaggggcttccgcggatccgggcggccgcgctcgagaagcgcagcttgccccctccagccgccttgggcgtgccgacagtcgacgacgagggcgtggccgggcgagacgaggccgtcgaaaagaggccggatgacgtgtagagctcgtgcatctgggtcagggactgcgacggccggaggggcgttcccgaggcattctttgcgacatagagcgtgcccttgcgcgcggccgagcggccctgaaggttgcacgaggcgggtcagcgaggggccggcgcttgttcagacgaccgcacggcggcacgcaccagagacgagctgttgaagaggaccgtgttgacgccatcgacgacactctggtcggcctgctcaagcactttagccggctcggccccttcctcctcgtccgactgccacgcgagcgcccgccgagccctgagctgggcaaattcgcgctcgttgacccactgctcgatgttggccgcgatcgtctgctcgcggtccgggtgctcgctgtcggccggcatgtcaaacttgcggacctgcttcttgacgagcacgagccgctcgctgccccggccgttagcgccggtccggaacttgatgccgtgcggatcctcccagctgtcctggcgcgtggccggcttggggctctcgccaacctcatcctccgagatgggcgccgggaccgtgccgttcgacttgcggcgcttcttggcgagcgacggccgtggccgcgacgagctgaccgagccgacctcggagagtacacgcttgttcagctttttggccgaccgctgggtctgcgccggcggcggcgatggcagcaacggcgagcgcgagccagagctcatggaccggtcatcgtcgtcgtcgcttgcgtcctcggccgagcccatctcggcgtccgatacagcctcgctcctgctctcgccacccgagccgatcgagaccgacctctgacgccggcggatcttcttgcgcggagccttgcggactggcgggcgcacgagtcgctcgctgccgctgctcatcagcccgtcctcctcctcatccccgcgctcgtcggcgctgtcgccgtcctcgtcgtcgtcgtcgcgcttgcgcgtgcgactgagctgctgcggagcgtccgaatctccgtgagcgagcgcaaggtcgacgtcatccgacattggctcttgcttgaccttgggccgcttggcaccgtcctcttcagagacgtcgtcggcttgagaagattccgttgcggacgcatgcgagcgcctgggggccgagcgagaggaggtaagggctctcggagcaggagagtcggaagggcgggcgcttgaccgcgcaaggatgggctcgctgggacgatccaaggagcaagggtcagcagcaacaccggcaagatcaagcgctccaccgtcgactcactcgccaaacccttcgccgcgtgcgcgccgcgagctcttctcccggaggatgagttcgcgcctctcgtcgtccgagtcgccgtgcgggccggccggcgttgcgctgcgatcgtcgaacgcaaaggccgaagggctgccaacgggacgcgcttggggcgcgagcgaggaatgaaagatgctcggtgtcatcgagtcctcgcggtcgactggagagaaagagagtagcaggtcagtctgcggcactcgacgccggttgatgacgcgtgattgaccggctggcgagacgccccgagcagctcgactccgaggacacctcgaacgaagagagaaggacacacgctgctggctcggccgcccacgcatgccgttgaccgcccccaagcgctcccagtcgctcttgagtcggccggcccgcttgcgcatggcgcgctcaagctcgcggcgctcgtcctcgaccttgcgtgcgcggaggacctcagccgccgcgagccggaactcgcgcttatcgctgtcggggatgccggccttgcggcggcgttcgagccggtagcgttcggccttggcgtgtagctgatagattaccaggagccgcttggcgtagtaggcgccgacgagggcgagcgcgaccatcgcccaggtcggcagaaggcggaagggcagcgtcaggagtgacggctgcgtcgccgccaacgcccggtgcgtctgatcgatttgatcggtcggaatcgaagttgtcatggcgccagcactgggcttgaagtgcgaaggaggcttgctggttgtcgaagtcgagagggagtggtgacgaggtcgggatgaggcaggaggcgggcgagcggcaggttggctcggaggcttcctcgtcgtctcggagagagcagccagctatcgcctggctgtacctcatcctcccccaacactcacgacaagcaaagcaagtcaccatgtcgcgccaggataaggccacgaccgaccgcaacgcgaagctcctgagggcgctcgtcaagacgcccgacaacaaggtctgcgccgactgccgccggaacggtccgtcctcgctcctgcccttccctcgtcgttcggcccgcacgcgccctcgggtcgatcaggcgagctcggagttcaggactgacagtctgctgcttcttctgctcgtcctcagacgcccgatgggcggcctggaacctcggcgtctttgtctgcattcggtgctcaggtattcatcgcagcatgggcacgcacatctccaagggtccgtcggcgtcgcgctcgagccgccgcaccaatcgttctctcagactgaccctcctcccctgcagtcaagagcgtcgacctcgacatctggcagccggaccagatggagcagatccagaagtggggcaacaagctcggcaatctctactgggaggcccacctcaagccgggccacgtccctccggagcagtaggtccccctcagagcctccccgagcagcaggccctcggctgaccgcacctcgcccattccgcgctcctcccttgctcgaactcctcactcgctcaaacagcaagatcgacagcttcatccggtccaagtacgagtcgcgccgctgggcgatggacggcccgatgccgtctgacccgcaggtgctcctctccggcggcgctgcgcccgcctcgcctccccctcctcaggcccggtcgacgacgccaaagacgacgccccctcttaccccgtcttcgacccacccgacccatccggcctcctccccccgccgctcgccgcgctcccctcagcgctgtccttggaaggggctgagagggcaggccaaactgcttacctcgatgtgcttcacgatcggctcgcccggccggccgtcagcaccaggcagagtcacaggactgttgaaatggttggcggccgccccgaaggtgtatatctccaccttgctgatataggcctgagcaagaggccagtcaaggtcagcccttatgtcagtgtccacgcagaagtcgatacgttgcatacctgcggcaggtctgacaggaggaagtcgaggatgaggctgacgatgatcgcgccctggtgaagcaaaggtcagccctcgcaaacctccggtctcttcgaccggtcgcagacgcacctgcgagtggcacagcaggacgaccttcttcttgctagggtccatcagcgcgcccttgagccgccggtagagctcggtcgtgccgtcctgcgtgacgtaggtgaagtcgcgctggatgatgcactcgaggaggtcaaacaggaaaccgcccgtccggttgtggacgccggtgatcgggcgctggaaggcctccgacaggaagttggccatgctctggatctcgcccgtgcagattccgttgatgacgagccaggcctcgtcttcgtgcgcgccgggcttcttgagcagcgctgggtccgacaggacgacgcgcgggccctgaagatgctttgcctgtgtctgatacacgacgtacgtgagaccgagcgtgaagagaaagagcaggcctggaccaaagatgaggctgctgaggatggcgccagtgcagacgattgagccaagcaggaggacgacctggagccagaggccgccgtacgagcccttgccggctgaggccggcggcgtgatgtccttagggatgcgaagcggcgagaagatgctgagaagaagcggcgccttcgacaggatgagtgcgatgtcggctttgaggatctgggctggatgttcgcgaaagagcgggatctaggcatgatgcgatggaggtcggtcagcttgagcgaggagccgcgagcgacggcctctcgagcgatgctcgcgggcgcaccggtagcgcctcctcgcattgtttctggcggcgtgttgacatcgtgcggctcggttgcgtgggtaggcgaaggggcagggaggggagaggacgaggaggttcactcgtatcgagtcttgattggaataattggcgcgtggcaggtcgaaggcaaaagggaggctcgagctggcggccttgctcgctcgcttactcggagggagaggcgcgcagtcgactgcatcgcgtcttcacgtgccaaacgacaagccttctgtcctgccgcaatagccacacgttgaaggcaaaaggcaatacaacatgggataaagacggctcaagaacggtcgagcatggcctgcaggtctggccggtactggtcgccgacaatgggaatctggcggatgacctggcggatctcgtcgagatcagtctcggtgaggacgacgtcgcgcgaggcccagttctcgtcgaggtatttgatgctcttcgtgccggggatgggcaggacgaggtcggccccgtgtacttgtgcgcaccacgcgagcgcgagctggcccggggtgacgcccttcttcgcggcgagcttctcgatagctgcggcagaaagcagacatagtcgccgtcagcacggacaagcgcgacgcagttcggcagcggacgcaccttcgacgagcttaaagttggcttcccagtgctcgcgtgagaacctcggaaacatcccggcaccccggctgtcgccaggctgatcgacgctgtccgggtggcggaaacgtccagtcaggaagcctttgcccagcggcgagtaggcaaggatcttgatgccgagctctctgcaaacctcgaggacaccggtgtgctggcggcaggcagaaaggcaagaaggaggcgggcagtcagcgggcgcaatctcaaagaggggctgtagaaagcagcgacgcacctcgatcgtggcaacctcgaagcatgagaactcgacctcgacaaagtcaatcttggcaacgttggccgcccgtcgaagcgtgttggccgacatctgttttgcgagcaaggtgtcagcgagagagcgacgatcaggatgaacaaagcgctaagcactgaccgcgctgaggccgatgaacctggtcttgccggcctggcgcgccttttccatcgcggcaacgctctcctcgaccgggacgtccgggtcgatgcgatgcaggagccaggcgtctggcacggagccgaggttctcgatcgtttggtcgatgcagtgcttggcaaaggcactcgagcctgcagataagcgtcagtgaaggtcaaccgaagcgcacagtcggcatgccagccagcctaaagacgcaccgtcgatgaccatcttgccgtcgaccgtcttcaggccccacttggtgatgacgaaagccttggaccgattatcgccctcgcggaggacggacccgatcagcttctcgttgtgctgctcggagccatagatggtcgcagtgtttatgacagagcaaccctggcagagggaggaagccgtggtcagtcagttggttgatttcctccgagcaggggcaaaggaaggggtttacaaggtcaatcgcatgctgcaggaccctcttgctctcctcgtcgttagtcacgccgtagctctgggacaggccctgcaaaggcaagcggcagagaagggggacgtcagaatggatctcgggtggcgtctgtcacgacaatcgggcactcgccatcgcgccgtagcccggggtcggcacgctggcggtgtcgttgatcttgaagagacaaggcatgatgggctgaattgcaaagtggagggcgagttgggggagaagagatgaagagatggcgacaaccagtcccctttttgggcgacggcagcttgcgacgcgcagcagcatcggccctccacactcgacgccctccctccaccttgctccgagcaaaacgccgacgtcgcccataaataacgcctcatgcgatccagaggaggccggcgagaatcgacagggcgacgttggccaggtcgtagacgcggtagaggtggcggctgccgaaggcgaaggcgaaggcgctcagcatccagagggcgccttccagcaagcggaccaggcatctgaaaagaaggagaaggctaatgtcagtcgtcgctcgctgcgaagggaaagagagatggtctctgagcgcactgatcacgacgagcgggcgtgagaaagcgtccgccctcacaggcgacgacgacagcgacgacgccgacgacgcgcaagacgttgtgatcaccgacaaagggctgccgccagttggccagcaggtcgcggacccagacgacgaggacgggcgcgttgaccggcagcagccagagcaggagaccgaggaccgaggcgtagaggttggctctcgaggccgtcgctgcatctggtgccaaggtcgacggggtgtgagccgcagggcgcgctcccgaagagtctctgaatcgatccaccgggcttgccgccagggttgagagcgcatgaacgaggtagaggatgaggaccgcgccttggaaggggatgagcgtagcgaccgccagtagcatggccaggaccggcacaagttggcgtttgcgggttggggcggcagcaacgtcctcgatcctgtcaagtgtgtatagcaaccatgatcagcgcggcagaacgccccgatgaaggcgaaactctgacgcacgttgacagcgagagcagccagcctcggcggtccaacttgcgcccgacgctggacgcgaggcggatcgaaccctgcaaggcggtcaagacgacgacgacgaggcctgccgccgccgataacaggacgactggcaggagcaagaagatcaagtggtggttgccgagcagagcctccgaggcgatggctgcgactcgaggccagccccgcgcggcagcgacctggaccgtgacgttttgcagcagttgggccgacgtgagaagactgagcgaccgtagcccatagagctggataccgctggagagggtgtcgagcagaggcggccaaatgcctagggccgagcaccgaggaggtcagcaactggccgagtcaaaataccgccggtggaagcaccttctgcccgatagcggcttgcttgcaaagccagaacgacgcccacaatgccgttggcccaagcgacggccgtcatccggtatcgaaggatgagtcggcttgagctcgcccgccaagcaagtcgaagtcgcacccccgtcgccgagcagtcggccgacgggtccgaccaatactcgagtgtcatgccgcttgtaggaggaggtgggagaaagggggcggatgctgagtgcgagcggaggagggcggtcgaaggcgaggggtagaaggccgattcgtgcgtgactggccggcggttcgggctcgagttgatcgtcacgtgccgcagcagcggagcaaagagagcacctgaagggcagacgagtcagggggtcgaaggaggcagtggggcgtatagggcgcgcacctttgcagttttgcggagcgtcgaaagcggccttatacacaagcagagagtgagagagcaacgacggcagctggaccgatctcagcagccggcgtggctcgttctgaagcggcagccaaaacccaagcaacgagcctacgcaacgtcaggcatcgtcagcagccagtccgcttccgacgaaggtcggcaaatgcagactaacggaaggtgccgcgcgaataaacgtctaagtcggcctcgctgaccgcctcgccgacgccccagcctgcgccgccatcggtggcgacggccgcccaacctccgtcaccgtggagttctgcctctgtccagacgaggccatccttctcgtcgacgccctcgccgacggcaaatgggccacctccgaccggactcgggggcagaagctgaagcgtcttgaggggcagcgtgcggcaggtcgtcgcatcgctcggggacgagcagcgcaggaggcgcgcagcagatgcgtcttcagggccaaccgagtcgatggcaaaggtcgtgagcagccggaaggtcgtgggattgccggtagtcggcaggggaaagagagcgagcgtcttgccgccgctgtgggccacaaagcggcctcctgagcggtcgagctcgattcgcttcgagccacggacgtcgagcggctcatccgagtgctcaagtggcggtccggcaccgatgagccagtccgccgcgacacgcctgcgatcctctcgcggagctgagagcccgcgcccctgccggtcgccgagctcgagcagcaggcgcgcgactcgccagcggacctgatggcaccagaccatggcttcatggtcgacgcctgtccaggcaccgacgaggccgctcgtgaagacgctgagcgccccgagcgggccgtacgtcgcctcaggcaaagcgcacgcgtcggccgcgagcgttgggtccgacgagccaccgcagagcgacataaggagatggtcgcgcgccgggtgctggctatcgagcgcatgatccggcgcaaagaaggcggcgatgtcgctgtaggcgcgagcgagcgagctgtcggtcgtcaccggtgcctgctggtgaggtgtcgagagcgtgacgacggaaaggacagtcgctgggtcgacaagacgggtgacagcatgctgcgcgacgatgccgcccatcgaatggcctaggaggacgacactctttggccgctgatctggagggagatgggtgtaggccatcgtgaggatgtgcgagacgcacgaggcaacgtaggccgactgagcgagcagcgtcggcccatggaaggccgagagcgcctcgttgaagtcaactggcgagcgggttgcgacgtctaggtcagcagaggaagcgggcagtcaagaatggggcaagcggctcgcaccggtaaagacgtcgagcggcctgatgccgcgctcggcgaacaacggtgccgggacagacggctgcgcccagaactgatgcgccgcagacgacgcaatggaccgcgcctgctgataggagcctgcgttgcccgggacgtagagaacgggcaggccgtccggctggcaagaacgagctacttcagcttttctgtcacaactaacgcaatggaggagggactgactgcctcatcgccttgccagccctgctcgcgatagaggaagagcctccagcggccggcccagtcgctcggctcttcgacgccccgaagcaggacgtaggaggggctcatccacgacatccgacacgtccagcggccgagcgagccagtgacgtgagccgagcttgcgagcaggacgaggacgagcgcgacgagcgggacgagcgccaggatgagcggcggcggtcgtctgcgaagggcaggagggaggaccggcatcctgctgtattcaaggcatcgagcgggagcggacgcgagcgggcgggtgaaggcgttccgagactgctcaagcagcgtcttccgaggaacagcaaggggaggtggtgggcgaggcgacagcgacacaagacgcctcaatcgggtgcgtttgggccgatcactccgtctttgcgcccaatctgggctgcctgggtcctcacacaacgcgccgccggcttgagcttggctgctcgacctcgaccttgacgacgacgacccagagccggcctctgcctccttagtccccccctcttcctctctctctacccacctgcgctaccccccatctctctcgctctctccgctatgggcaccctctcctcgcccgcctcgtcctccagccggctctggtccggcacactcgagctcaacggcctcgtcctcccaggtgcgtccgtcaaccgtcgcgtgtttgccagagcatcaactgacgctcgcccgcaatcgtaggcttcgcgctctacaagcggagcccgccaacctcgtctgcctcaacctctgcaaagggtaagcaaaaggcgactcctgtcgttctcgccggcccggcacggacaatgcggtcgcgcgcctcggcgaccggtctcccaaccccgccatcgacggccgctggtctcgggccaagctcgctcacctcgagcccggaacgcgagcttctcgttgtcggtggtgggtccgagccaagccctccggtccgtcgaccgacccggcgcgtttcggcactaaagcctgcgagctcttcgacctcgggcgcaccctcgccagctactgcggcgccggcaacgacggcgaccgtaacgggcccgacgatccgccggatcaagctcacctctaccctctttcctcagccgtcattagaaaacgacctgacggcgatacttgcggacgctctggccgccgagggagctcagctcgtcgtcgataccgtcttgccggtcgccgatcttgagtcctgcgacatcgagctgccctgcatcgagctcgacttcgacgacggcttcgagctgtgcgtcgctcaggcactgaatgcgactatagtgtaaagctgacctggttgttctgtgcagctgcaacaccggtccgagcgccgaatggccatacgacaactcaccggccggctgcctgcacgagaagctcgagacggccatctataacggccatacacagcgctttgcgatcgttaccgtccgctcctccaagggattgccctccagcgaacgtgtcacgctcgccgtctatggctggggtggccccctcgagacgcgcgagatgcggctgtttgcgatcgtcctcaattcaaaggcgcgctcacgcctccagccgtcgaccatctccggccagtttttgagcctcgtcgttgagcaaaaaagcgagtcatctggatccatcctcggggacccagatgaggagctggtgcttcctcggcctcatccaactgctgcggcagaagcgctccagacgaatgactccgccgacctcagccagccggtggccatcaagctcgaggatcaccgcaaggcaactgtctctcatcgtagcagcactgttgcacaagagcctcgatcagggtcatcgcacgccatcgacccgccccacccgccgtcgtcatccgacgacgcctccgcggcgaacgacccagctccccttcctccgcgatcgaagcggccgaggccgaacgaccgcaaccggccgctcaaggaccggctagccaacaatgtcgcccacgagtcggctcctggctgttcggcatcaggctcgggcccgtctggtgcgcggccgggcgtctggagcaagccgtcaacctcgcgtcggcccgccaagcgcgctcgcaagcccgaggctgatgtcggcccgaggccaaagctcaaaatactggccgtagaatctggcgaggaggacaaaggctcctgggagacgaggaaacgcgtcacgaaggatgttcgagacggcggggtcaacagctggctggcggccgtcgtccctgggtgcgccggcctcgtggaacggccgctctcgcccccgagagctaccgacgtcgcctcggctgttgcttcgcgcaacctgagcgtgagccctgcagtcttcagccgagagaccttcattagccgacgctgactgccgttctgttcgaccttcagcttctgcgccagtgcacgaccatgtcgctgctctcgttcgacatgccgcgcagtcatcccgactggcgacttgtccacggctttatcgtccgcggcgccaagttcgcgctcgtacgtctcagcgcctgcactgccgtctgatccgcatctctgaggggttgctgacccgagaacgactcgtttgcagcgtcaccgcaaaaatgaggaactcttgactctcgccgacgtcgctgcaaccgtcgagcttcatgtcagcgcttatctgccggtcggcctggccgaaaattgtctgctgagagcggaggctgcccggctgcgcgaggcacactgcaagtcggcgctagagccggtcccgacctcagctgaggtctcgatagaggcagcggtgccgatggacgtcgacccttcagtaatcgccgctgccgacgacgtccaaccgactcctactgtcgcaggggagactgtctcgctgcccacagctccgatcgcaattggcgcggcgcctctcgtctcgagctaccccgcggctgccgccaacgagggcgcgctcgaggatcttgcgtcttctgctctggttgcccagccccccttcgtccttccgacccgacctgcgacgctcaccgcggtgggcgatactgcatcaccgccaaaaacctctgtccctcctcccaaagccgatgctcgctcgaccctcgctcatatcctcaacgacgtctcggaggcacctccggtcatcctggcggcggtcgctgtgcgcgacgtcttttctgacggcgattcggacctgacctctgttgcgtccgaggacggcgaagacgacaacgacgacgccgccggcgaggaggaagaagaagaagaagaagaagaatacatcaactcgcggcctacgacgcccgctccgtctctccctgtcgctgcgtccccatcgagcccgctctccgtggcgttcttgccggccacagtcatcgccgccgcggtcaaggcgaggaccccctttcggcgggctacccggtcgacggctctcctcaacctcgcactgcactcgtctgccttaaaggccgacaacgaggctgcggcccggacgagcccgagcgccgcctcgtcgacatcggttgcaacgccgccagacgggatgctattcaggacgctcctgcttcacggcagcgttgacgagactgcctcgtctcgtcgatcgtcccggcgcgtctcgagcggcaacaaggtggcgccgctgacggttgcggcgggaccggcacctgccttgccatcggtcgccgttgtcgctgttgcgcccccttacggcagcgcccctcttgcctcggttccagccgctgtgccactcgccaaggactttgccacccgacggtcgccacggcggacacctctcgccgcttcgcgctcgcttccgccttcgcctcactcgcccgtcaaggaagaggaggaggcggccgacctcggcgcggcgtttgagcggacgattggccggggcggcgaggtcgtctacctgctctcgcgccgctcgcgagagggcacagccgccagcgcctgtacgatttaagatttatctcaacatcattttccccgtctcactgttggccgtcccccctgagagcgcgcactcttggacgtgccctgttgatccatgacggctctgacggccggatcaggccggccgaatgcaagtgcgagttgaccgcttgggcgcgcgcgcgggccgtgcgccctcgcccctccgtcgcccctctgcgcgaactctcgagcccttggaagaccgtctcttgcatctttccaatcctcattcagcccaagctctccgcccatcagctcgataatggcatccaccaaggtctgtggccgctctcgccgacgccggccgggctcgccggcaggcagatgagcaaccatgagactgacgggctcctccctccctcggatctctccctgcccgacgcccggcgccttccctcgccttccctctcgtccatgcacgcaccgactcgctgctctccttcgccgtcgctcgccaaatgcgaacaacgaccttgcctgtcggtccttgcacacatacaggcaaccttcctcaaggagtacaagctcgtcgtcgtcggaggcggaggtgcgtcccggacccttgtctcgtcctctccttcggccagtcgagctcgggcaccgtctgcgaaccatccggctgacctccatcgctcgcaatcaacaggtgtcggtaagagcgctctaagtacgttcaagcgcctggtgccagggcctctcgagacgccgggacggtctgtgctgacgaccgccctccctcgaccgaaccccttttcgacgcacgaccctcgctctggccgacgttgctcgctgctcctcttgcttattccttcaaccatcatttcgccctacgcatactctactgtacgctctcctgcctcatgcgtccctgccaaccgactctgtcgcgcaatcgctgcctcgacctccgccaactcggtcctccttctctgctcatccacagcgatccagttcatccagtcgcactttgtcgacgagtatgatccgacgatcgaggactcgtaccgcaagcagacgacaatcgacggcgagattgcgctgctcgacgtcctcgacacggctggccaggaggagtacgggtgcgtcctgtccagctggcccggatccatcaggcgcccgctttgtcgctgacacccatccttcgccaccttcatccagcgctatgcgggaacagtacgctctctatccctgcctctcctacgccgcgccgacgtcaggcggctgatccgaggctgagcgctccgcttgcaggtacatgcggaccggccagggcttcatgctcgtttacagcataacctcgcgcaactcgttcgaggagatccgccagttccacgcccagattctccgcgtcaaggacaaggaccgctttccgggtgggttcccatggtcgacgagggaagagggcgatgctgactctatttgcccaacagttatcctcgtcgccaacaagtgcgacctcgagtacgagcggacagtcaacacgtttggtgcgtcgtcgtctgctggctccttgacgctctctttcgggtggctgacgaccgcgacatctgcgcttactttcggtagagggccggcagatggcgcaggaatttggcacgacgtgcatggagacgtcggccaagcagcggatcaacgtcgacgaggcgtttgcagagctcgtccgcaacatccgcaagtacaccgacgtgcgtctcttcgcctcctgctggttaccgtccgccgatactgatcctccgctcctgtgcgtccgttctcgatcaggaatcgtcagcgaagccggtcgccggaaaggacaatgccgcagccgcgagctcgggcggcggcggcggccatgtccctctcaagcaggactcgcacggcggaggctgctgcggcggctgcgtcatcctctaagagtcgagggtgtcgcttccgtctctgtttcggcttccatcctccacccggtttcttctctgctcgcataccccccctcacccaggccatcctcgttcggccccggaccttgcttctttcgcttcctcgcgtgctacgtcgccttgtagactcgcttttcggcccgcatggcgcgcgttcgtccggccataccccagccccacggccggacgcaacccccttccttcttctcttcacaattttcctccactgcccctgctctccaccgccgcatcgtccggcgaaggcgcccttgccaagcatcgtccctccctacgtcctcccctccccgtcgtacttatcgcctgcccccacactcagaccgctaatgcatgccgcgttcgtgattaagaggccatggagcgcgtcagactgaaagagagggggcgttacaacggaaagggaggcgaagcgagggagagaaggggccgggcaaaagcgggcgtgtacaacgaagagacgggcgtgatggacaatggaaagcggactcaagcggcgcgggtcgcgccagtcgcccggcgccgctcgtcgtcatcgtcctcctcctcctcgacggccggaggaggggtgacgccgtacgtctccatcgcgctgagctttgcgagcgcggccttgcgcttgcgttcgcgcttggcgccgatcgggtcggatgagaggcccgtcaccttgacgacgcccttctcgattcccttgacgacgttcatggcgagatcgggcgagccgacaaagtagctgcagatgccgatggctcgggatcagcgacaagggaggttgggaagggcgaggggccggacgcacccggccatgaaggcggcgacgtagagcggacgctggccaaagtactcgtcccgcttgaaaccagcgacctgcaaggaaagagaaggagagcgtcaacaaaggcaagagcttcggagcttgtcgacgacaagggggagggggcgacgcactgactcggtcggcccgccgatcgacccgaccgtcttcttctcgcggggcttgatcttgaacttgggtcggtttgggtcgagcttgaacgacgacccacccgagatggagcccgagatcgactctgcccggctgatggttcgcgagagcgggatgccggtcgacgcgatcgagggcgtgccggcgtgcagcgagggaggaggcgtgatggccgtcgtgtcggcgctgacggttgccatagtgctagagagagagagagaagagtggcgaggcttgggaagggagatgcgagatgggtgtggcggctaggcgatctggctgggctgagaggtgggtgagggaaagaggtcagcgaaagctcgaagctcgaagcgagcctttatagatggccctcgaggggaccatgctgctcctgaaccgcccaccgaacgacagtcacggtgtggctggcccccctagctccggtctccttccggccgcgacatcaaaggaaggccgagggctgctgatacgggcgacggcgacggcgatagccgggacagactggctgcagccttgggaggagcgagcgcagagggcgcggacgtacctgggcttgttgagcttgagctcggtcgtggtcgtctgctgggacggtcagctcccttcgccgcctctgcagctgctgctcggctggcctgtcgggcgaccgcgtggtccggcgaagggaacgcgtggtgcgtcggagactgagagagcgagcggggcgatcgaccgccgcgtcttgcatttgcgcttttggcgtcggaggcaagcgacgacggacagcggcgacgacaacgcgatgggagacgacccgcactactcgtcccgtcaactcgcattcctcaagctcgcagacggtcgatggtgcttctccgcctgcctaagcatctcgtcctccttctcgttcatgcggccagctcgcttgccctctcgcggccgacgacggcgccggccggctgctcggccgtcgaccccttccgcgcgctcggcggcgagcgctacagctgctggacgtgcgggagctcgatcgacgcgatggccgcacgctgcaaggatgtttgcttgccggacgagcgcgaagacgaatcgtacgcctccttgcacgagctcggagatgctgccggtgatgaagacggcctgggtcgagcggagggcagctcgcccacagccgccgaaacgacgaggcgagaacgcgtcggcccagacgaagcagatccagcagtaccaacgaccggctcgccggaccgtccacctcggccagacatcgatggcgagcagcgctcatccgacgtagtagcgtcgccgactccgacgttaggaccgacaccagcagcgtcgcgaccgcctggccagggcgcaagctgctcgcccgcgacctcagctccggctgacgagccgttcctctcgttcgaagactggaaggcgcttcagctcgctgctggatcgtccggcagcagctccactcccagagtaccgagcccctcgccttttgccggggatgggatgcgcgatcccctcaacgccgtgccggccctcgcaccgaagcgagcagcgcccgaggccgaccagtccccgcccgctgctccttcttcgtcggtcagcgccgtaagcaggcctggatctatctcggagccgccagcgccaccttcgccgtcaccagcgccgtccgtccgggcgccgtcgcgacgcttcaactacgcctcgctcgactgcagcgctcgcgtccactattcgtcgccgcggacgaggtcaccgtcggcgctcctgcacaagtccaaggaccgctatatgctcacgccctgcagcgcggcgagccactacgtcgtcatcgagctctgcgacgagatccggatcgatacgctcgaggtcggcaactttgagttcttctcgtcggtcgtccgcgacgtccgggtgcgcgcgggagatagcgaaggcgacggccgcgaggccgactatgccggctggaaggagctcggcacgttccggctcgccaacctgcgcggcgtccaaccgttcaagtttgagccgccgaccggcttccaccgctaccttcgactcgactttgtcggccactacggcacagaatactactgccccgtctcgctcgtccgcgtctacggcatgaatcagatggaggcctaccgcttcgagctcggccgcgaagcccaagcggcaagcctcgcggcagctgccgtcgccgccgcatctggcgcaaaggtcgacgagtcggcgagagcagccgctgcgctcgaagcggcgccggcaccagtcgcaggggatgacgaacggcgatcagtcgaccgcccggaccggaccgacgttagacaagcctcgaccggtcagctggcggctcccgtccgtgatgacgctctcgagagtcatcgccgggtcgcgtcgccgacactcgcagtagacgcgccgtacatcggcccaacgctcgggctggacgcagatttggccgcacggctcgccgccggagtcgtccctaccggcgacccttcagccccaacactacagccgtccgtctctcaggcgtcatccgacttgagcacgtccgcttcggcgacctcctcaagtcgctctcccgataatcagccctccggcgcgggcagcgacggatcagctgtctcgcccgccatcatgccttcaacgtcatcaagagcgccgccgttgtcggccgcggtgatctcggatgcttcgaacagcaacccgagcgcctccgtcgcgtccggcagctcaccctcacagtcttcacaacacgcgccctcgtcccctccaccgccgccgccgccgccgcgcgcacctgcgcactcggcctccgtcagcatccagcagcagcagcagcagcaacgggcaccggcctcgccgccgccgttaaatctccgacagcctcaaccacaaccctcaccctccgattcgggcgagtcaatctactcgtcgatcgtccgccgactggcttacctcgagacgacgagctcgctcacgacaaactatgtcgaggcccagagcaggatggtccgggacgccttgcgcaagttcgaggccgaccttgcggcttggaaggccggcatcgagagcgccgagaggagtcgatgggcaggcggcctcgagggagtggtgagtgcccctgggctattcgtgccagatcaaaggccccggctgatcaacattgcctctcctttgcagcgtgcgcaacaagagcggatgctccgttcgacgacgcgcgaatgggatgcgcagcggcgtgagatggagcgtgagcggcgcgagtttgctcaccggctcgtccttctcgacgccgagatcacgctgcaccgctggctcctcggcggctccttcttgcttttggtgcgcacctcgtccgagaccatcccacaactagtgcaggcggctgacccggtcgacacccgctcatacggcgtgcttgcagctcgtcctcctagcctgcttcttcgccctgcgcctcggctcggtcgagatggtaccgatgcccgaggccgtcgctcgagcgacgcagaagatcaaggagaaagatcggcggagcacgggcgacattcaggacctcgttcgacgacgcgctggtgcgtctgaccgggcgcttgctcctagccgacttctacgcgtgttgaaactgtggcctttatctcttcagcatcacccttgcctcgcgggacgccacgtccgacctcgccgacgctatccttcgagcatgccgccacgccgccaaaccccatgcggcctagaatccgccatcactccaacacgccgaccaagcggtcattttcgcttgtgcctgccacaggtagcttgggcggtcagctccttggcggccggtcagccgagagctcgggccggcccaagtcaatccttggactcagcggcggcagccaccgcaaagcagcccgcgaggcgcatatccacacgctcgcgcatgctcgactgcagggcggcggcgtcggcgtcggtgccgggcatgtcaaacgacggtcgatgagctcgtcactcgtccctggcgacctaacgccaaagcggcgctttggcacgctcgccagccacgccaacgtcggcctcggctttgaccatcacgaccgcagcggccatttgtcgtcgggcggcgaggaaaacggcggcggcaaagccgtctttgacggctcgtggacgccggcgacgacgaccgacgacgacgaaagcgacggcggcgaggcgtttacgttctcggcctctcgtgacggagtcaagacgcttcagaaggtcagggttccggtgttcgggccaagctaggggcctcttccgcccgctgggaggcgggtcccgccaccggctgagtcggaggggttgccgatgctcgctcagccagatggcagcagcgtcgatcatgttccatccagagccgcgcaaggacagagcctgcttccgtccgcccgaaccctgtgcctcgtatcagttgcgccccgcccacgtcgcaagcgtccccgccgcttgtttgcttgcgccaagccgtagatccttcgcttcgccgtgggggtagccgcaggtcgtcccatctcggcccatcgctgatctcttcgtcggccgacgattgcgatacgagcgctgatacctcgaatcagatcaagagatacttcggctcatcgcagccgacccggacaagtttaagcttggcgcgcgccttcgacaagccgttggccaaactcaccccttgtcccatgctccgccagctctgcggtgatgatcgcagttcgacccccagcaggtataaaaggccagcgatccggttcccctgttctttcctcatctcgcccatcatcctcctccctccccctccaacaccctcctcgccatgctcgtctccgtcctcgccaccctcgcccttgtggccgctgtcccgacctcggccttccagatcgagaagcgtatccagccgtcggcctcctacgccatcggtgtgtctcttacggctcgtagatgcgtcccgacgagattgctgacatgcgcatcacggtccgtcgcagccggcctccgcagccccgtgcgcgctctctctcacctctgaaggacacagctgtcggtcactgacccctgcaaaacctctggcctgcagaaagctcgcggatggtccaacacgacggcaactgtggcgccctgcggcggcttcgccgtcggccctcgcaccgagttcccgctcagtgagtggcctccctgcgaagctttggtcaaacttgaccaccactcctttcctctcctacagctggcggcaagatctcgatgctactgaccgaggaggcctacctgctcgagctcggcttctccaactcgtccaacccaaccagcaacgacgatttcctgccgctcatcaacaccctgtcgggcggcgaccaaatcggacacctctgccagaacggtgcagtcgcatctagctcccctttcgcctctcaattgttgacatgagcatctcgatcgttgatagggcccgacatgtccgactttggcctctcggtcggccaggagatcaccttccagctcgagtacaagggcggcgagcgaggcagcactaccttcttccaggtccgtgcccggccccacacccttgccagattggtccctgatgagtcgtcttcccccaagtgcgccgacattgtcctcgtcgcgccgacgcccgagaacaccaacgtcacctgcttcagcgccaccgtctctgcgtcgtcggttgacgaggaggccggctcgtaccacggcagctctgcctcgaactcttcgtctagcagccattcctcaacctctggcgatctctcgaacgccgcttcgggcggcatcggaggtgcgtcttctcttccgctctatgtcgttggtcctgctgggtcgttgatgcttcgcttcccttgcgtcagccggcgtcaccgcggccatcttcctgcttgctttccttgccctcttgatgaccggcgtcgttgccatcccgggccgcaagaagcaccagaaactagctgtcggcggtgcccttcccggtccaggcccggccaaggcgattggatccgacacgagctcgctcggctcgagcaaccacccggagactggcgagaagcgttcctaacgtcttggcacaacgcaccgccggctccgcacaaaaccttctcacctccccttttctctcgctttccctcctcctgatgtctttctcgcgaccataggctttcccttcctgtcctgctggcctcttctgtcatgatgtctcgctctttttccgcaaacgcattctatcggcgatgagcactcacacatcagcgtccatcgtcgaaactgcgctcgctcgtctctgatggttgtcggctcgtccgtcggctgctgattgacgtccggcgactgctgatcgacatacgctggttgggctccgtgaagccgcctgaccggccggcggagatgactgaggccttgcgttgctcgtcctgatcaacgtctcggaggtgcgctgcaaccagatcctcctgccgagatacccgagcgagtcagtgacctagatgactcgccgccacagtggagctacgcgcaccgtcaccttctcaccggcaccgacgctagctagagacgagaagtacgagtcttggccggatgcgccaaagtggtcgacgagagtgtcgagaggtgcgcgtcggccggagggcgactcgcggcccgagagcgacagcgaggacgcatgcgtgcgcgctgaggagctgcttgcctgacgccgctgacccgagagaggcctcgctgaagtaggggacgacagagccggctctccgtcttcctcctgcagctggtcgcgaaggagggcgacccgcttgagctggaggcggtcctcctcctcctcgatctcgtccgcccgcgagatccggtgggctgaaccgagggtctgagacgacagactttcccgcgcgccgacaacaggcttcggcgaaaccgaaagtcgaagaggtcgcagcctggccgccgtcgaggggatgggaggagtagcgaccgtcggcgaggccggcgtcgaaccaaaaagcgctgcgaagccacctctccagtcgatgctcgaccgccggaccttcttctcctctactgtgactggaggagccggcgagtaatcggccgcaagctgagatcccggcgagacggcagcgaaggtcgatgcttgaagggcgggcctgctagttgtagagccgcgcagggtccttgtccgacgcatcgagccctgaagcgaaccgccggcatctgcgagggccacgagcataacgaaaagtcagcaaaagactagggcttgttagagacgcagagctacagaccggtgctaaggatatctgggcggcgcagaaggtgatgtcagctcaagagggttcgacgtggggcgacaggcaacgcactctcaaagccgtcgacggctgcaaggtagggaggtcagcgtctgcagaagctcctcgtccctcaccggacttacagaggatgcggtccaggatctttgaggtgtagagggcgagcgccttgttggcctccttgaggctcttgacctcggcccgaagggcgtcgccgtcatcgcccttctcgagtcgacgcagctcgccctctcccatgtcagcctcggcgcggccaagttcggcggcgagatcgaggccgctgcgaagggaggggtcgccgtcagagtttttgctaggttcgaggccgcccgagcaaacgtacgagccggtgactgggtaatcacccaggcggtcgccccgaatctgccgccttgcctcgtcgttctcgaggatccagtccgctccgtcgatctgaattttccgcttcgagtcgctgaaagtctgctcctcggaagcgccgttcacgaaggccgggtcgaagtcaaagctgggacgcgttgccgagccgggttgcgacggcgacacgagctcagggtcgagctcgccaactgagggtagggccgtttcgccagcggcgtcttcgcggaccgggtcgagcgtgtctgcaagtgcgctcgggcctgaataggatcgtgagaggagcccatttgaccgcattgcgccggagaaggtcctctcggtcaaaagcaggtcgtacgactcaatgtcgtcctgcgtaaagggcggcatgagctgagcgcaaagcaaaatagagagccatcgtccgaacctggagccgagcgtttgcctgcttgaggtcagagagctcgtcactgttacgctccatcgcatgttgaaggctgtcgtaagaccgctcgagcaggcgcaggtcggccttggccgcgccgagctcggcagaccctgcctcgagctgctgcttgaggtcggcgatccgagcggcacagtcatctccagcgtcgacgtcgtcggacaatgcctgagcgttcgagactggagcctcgaccgtggctgcgtcgaaagagcgcagcagcgactgcgggcggacagccggcgtcggcaggcgtgcgctcgaggcctgtaggcgcgacttaagggactgcaagcagaagtgcggccggtccagatcagcgtgcctctggagacagatgaaaggatgcgaacgcacctgctcgttgtcgtagagcgcttgccgctcggcatcgaagcttttggcctgctcggcgtagcgtcgtccgacctcgcgcgtctcgcgctcgagcgcgccaaccctctcgcggagccgatcaaccagcgccaggttctcctcgagctcgtcctcgagtcgcgcacggtcagcctcggtctctgcgttctcgccgtcgtaactcgagacgaggcggacgaggtggtcgttcgaggcttgaagggtgtcacgcaacgcttcgaggtcggcgacgagcgcggcagtctggcgagcaggcgcgtcgagcaaccgtcgagatcagtagagcaccgaccggctcgacagccgtgaagacacgcaccgcatcagactcatcccagctcctctttagctcagacaccagctcgtccgtcgacatccggcgcagctcttcgtcgtcggcgaggtcgcggacgctgcctttgccgaggccgcgcgcgcgggcccctttgatgggcggcctaggtgcgagccaattgacactctgctcgctcgatgagcagacgacttgaccgtcacattgtagctcgtggagcgaggagatgctcgagctgccgttgttgaggagcgaagagggggagccgcctggcatggcccgctggcggccagaacacagggaagagggcgcgaggtcggcgtcggcgagagggaggccagtcttgaggctcatggcgggccaagggatggatcggaggagcttcgatttggcgctgggtgtagctcaagcgaagtacagtgcggtcggatgctggaaggtagggtggctgtcgacgtcgacttgccaacctgcttgcttgcctttcggccggcgctcggccgggcgccgagggttgaaacgaaaaggggccgatggaggaggcgcgcaagacggcgggatggcgggcgacgtgacagacgagcacaagtacccgccgacagcatcttccgacaccccacaacgctcgaggtgagcctccagtcaagggcaggtctgctgagggacggcctggctgcgagtctgctctcactcagcccgcctcgtcagacggccaacgacggcagctgactcgccgacgctcccgtctcgtagatctctcgcgctcctcgacctcccacacgactcttcctccgatgctcaagcagtaccagctccttttgttggtcatcctcagtgccacgctctcatcgatttgtactgcccagtcgccagaggcctccgctgccgcctcagagaccctaatcgtctcgctaccggtgcgtcccgggcgaggcttcgcgctcctcgttggctgccatttgacctcgctcctgctctcagctcggccttacgtcgctcgactttgagctggcggtcggcgatgaagctctgctaagctggaccggcggcgagtaccgtgagcatcgcgcgtcttgcgctcggacccctccctttatcgccgctcacgctgaccatcgcccgcctcgtctgtagcctacagcgtacgggtcatcggaagaggagaggtgagcagcatagctccggaaacatcaatgatgcgacctgaccgagctttgatcctcctgtcagacagttgatgtcgcctccggccagcaattcgggctctactcgtgggtgatcagcgtcccgcccggcaccggttaccaggtcgaggtgacggttcgtagcttcacacgatctgaccccgaccagttcctgattgcctgcgatccttttcctctaggatgcgactggctacgttgcgacatccgagcgctttgccgttgtcgccgcctcttcgactcctacgtcaagtggatcccgcagctcagcgtcccgaaccagcactctcgaactccccggcttcgagtcgtacctccagcctcgcaagtcgtcgacagcacgggcagccagcttgggtacgagctcgacttggtcaaagacgtcgtcagcgtttcccttgtcttcgtcgtctgcgcttcctgcaagcagccatctcccaacgtcgaccatgatcggtgcgtcccgttaaaccagtctgttacccgcaagcctgtgactgacgatttgcgtcctgattgaaggcatcatcatgggtggcattgcgttcggtctctttctggccgccctggctgcattccttcttcggcgtcggcgcaggacgtgcgttacttccaaccaactctcttatcaaggtactttgcctagactgacttgtacctcgcagccgtgccagccggcgccaggcttcttcgctcacggcctcgggcgagatcgacccttctcccgccgtcgacccctttccgtacactcccaaccagcccatgacgagcacggccgccagcctcgcatcaggaacccagccgatccatcccggcctgctccagcagtactcttccggctcgaacgtcgcctacctgcaccctttgccgctctcggtcggccagcctgattactttgcgggaccgccgccgatgccgtccccgatgccttcggcctcgctacagaccggcttcttgccgtcgtcgtcgtccggcttcggtgacgtcgccagcagcgtcggcacgagcgagacggcccaggagcggcgcgaggcaaagacccggctcttccaggcggcgacacccgcccagcagcagcagcagccgctcgtcatccaggagaccgactcgggtgccgtcgacgccgacgcagccgagacggagcggctgccgccaatgtacaaccaggcctggggagatcaggcctgagtcagacgcccccctcctcgttcgtatgatccgcgcctccctttgacttagccctcggacgctttctcgccctggcgccacgtcctctcccctcaccgctgtaatgcccccacacgagcacgctcgtgcaacgtggaacgaccgcccggtcgtcactctcctgtcctccttttctatcatgtcagccccggtcccctctcgcgtgtcagcccttcctccgcgcacacacccggcaaagggggatcgaaaaaagaggcatgtacaggccgacaagacaggagctcgagcgagatgaggagggagagggagccggcgggatgggatataagggtggagatggatgagaggggcccggggcgataggatgctgggatgcaagcaggtgcgctctccagcagtaagttggacggcgtgcgagtgaggagtgcatggagagagagagaaagaaagggagaagacgatggagctagaagtcggggaagaggccgccgtgcgggtcgggcccggccttgccgtactctgacgtgtcgcactcggcataccgatcaaactggctggtgtcgccatcgccggcaatctttgggacgtacggcgccggaatgtcgcgccggtagagccggtcccagtcgacctcgccaaaccactcgtggccaaagatatcgtgcgagccgctcttgaggttgccaaagcgcttggtgaggtccgacgtcaggagcgacttgagcaggtccttcgacatcgagtcaaagtacgatgggtaccggaccttgccggcgataatcttctcgtagagcttcatcgggttgccgtcctcggtgaagaagggcgggtagccggcctgaagacgaagcgggacgagcaggacgtcagctcgggtcgtcggctcaaagacgaagccggactcacgagcatctcaaagatgaggacgccgagcgcataccagtcgacgctcttgttgtagccctttgactggacgacctcgggcgcgaggtagtcgggggtgccgcagagcgtccacgtgatgtcgggcacatactttgcaaagccaaagtcggtaaccttgacgtggccatcggcgccgaggaggatgttctcgggcttgaggtcgcggtaaatgatgtcgagcgagtgcaggtagtcgatggcgagcgcgacctcggccgcgtagaacttagcgactgagttgggaaagcgctggagcgggcagggcgacggggaggggtcagcggcgggtacgagggtacaacgcaagcgtggcaaagggagcccgacgtacctgcgacttgcgcaggagcgagaagagctcgccgccggcgacgaagtccatgaccatgtagaggttgcgcgggtcggcaaacgtcccccagaggttgacgagaaacgggtgccgcacgcggacgagcatctcgcgctcagagttggtgtgctcgacctgcttcatccggacaaccttctccttgccgaggaccttgacggcgtagaagcggccgttgtgccgcgacttgacgagatgaacgcggccgaaagagcccgtgccgagcctgcgagtcaagagggagcaggatgaggtggtcagcttggtgatgggcaggtagcgtggctgagccgccaggagcatcggctgaaagagggaccgcatcgagcaggacatacgtgcgagcgacctcaaagtccttgagggcgtacttgccggccgtcttgcggaccttgacggcctcgccggcaccgttgccgccgctggccgcattcgtctttgcgacggcggcagcgtggatctgggcgacacgagcgttctgctcggcctggcggagagcggcctgagcgacggcggcctggtcggctgctatgctcgccggcgtcggggcctgggtctccgccggcacgggcgggcccgacgagtcgtacgagggcgaggcttgcggagcgtcgaccgacatgggttcagagtaggtgccgtagcctccggcttgctgggatgcgtgctgcaggttgggcttggaggacgacgctgccgggtgatactcgcctcggagcgcggccgagaggttgcggtcgccggtctgctgctgaggtccggagtggtaggacgaacccgagccgatcgagccgtttgaggatgagctaggggttggcggcgcgcggttgggcagaccagaaggaatgccgctgtaagggtcgctaagcgagaaaaggtaggcgaggaaggagagggcgagatggaggtcgagcgggaaaaggcagctccgtcaggctgagacccttctcgactagcgcgcgcgcgggcgggcggccgcgcaggcgggaacgagacgacgcgcgcgcagacgcacctcatctgctgctttggaacggggcagacggccggtgctggctgggcgacagagggcgaggttggtcggtcgatggcgagcgctcggaactggagcgtgtcgaccgggtcggggaggacgagcgtcggcgaggttgcgtaagggtcccggtagccgtcgctggggctgctgctctcgtcaaggtaggcggccgcgggcaactttggatgcgcgtaagccggactgctgctgctggcgatctctctcggcggcgatggcgggggcgacgagctctgctgctgctgctgaagctgggcggctttctccttgtaaaggttggaggtgacgcgggcgaggaggccaactggcatacgggcggcgggcgcaaggagggcggcgagacaaaggggagggagagattgggaggtgagcgttcgcggatcggcagcgcaaaggcgagtgaatacctacactactggcgctcaggattggtctgaagggcctggaaggggaggagtgggtgagccatgtcttgccggtcctctgagacggccgaccatcgcttgcggcgagccactcgtgtttggcgtcacgaccgcaaccggcgacaacgacgacgacggtgcactcggtcgatgcggccacggcggattcgggggcatgaagtcattgcgagagcgcttttcttttgagcggggaggtggagggaggagaaactacggagggagagagggttgggcagcccaggacgggcgaaacgtgggggctaatgtctaaggggagggagggagggaaagccgtcggcgagtcagttgatggcgcaagctggtgtcagagacaaggtagacgggactaacgctaaggggtcagcggagggccgtgagggccgagagagaagggcagagagggagagagagggggagtgagagtcagcaggtgcggaaggagagagacgaggcgagcgcgagaggaggacgaacctggtcgagagcccgagagctgccgaagatgcgaggagaggggaagagaaggcgagcgggaccggtgagaccggagagcggaagaggtcgggcgccgagaccgaagtcggcgcggcttctgccaggtcgtcaggccagagtcgctacaggcaggagggggacagaggtcgggtcagtctcgatcagcgagtgaaacgatgagggagagaggaaggactcacgtgtcaatgtggtagaagtgctggcggcgggcgtcaagtcggcagacccatccggcgggcaggctcgagcgcgtcttgtccgcgaggttggcctcggtcacagcgggaggagggcagcggtctgcagcgacggccgccggcagagcgaccgccagcggcccatgcgagcagccgaccttgaggttgagcttggcccggccctcctgcaggccgagcaggccgcgcgccgcagccttgacgtcgaacatgacgacgtcgtgcttgaaggccggcgcgggctctgtgatgaaggcggcgggagcagagaccgggtcagcgacagtcagggcaagagcagatagagcggtcagcgacgcttcggcggcctcggcagccgtctcctctacgaccgccgtctcctcctcctcctcctcctcctactcctcctcctgctcgactgccgctcatccgacgtcgtcagctcgtcagccgtctcctcaggctgctggaccggccagcccgcgtccgtcgtcgtcgtcgactcttcgacgaccgtcgtctctctctcttgatgatctcggccttggccttggtcttggctgcgcgcgagagcgagggccgagtgccgaccggggccgggaggttgaaacggttgctgcgagtggtggtcatggtggatggatgctgtatgagagagggagtagtagtggtggtggtagtggtggtggtggtgatgatgaagggcaaggaggtagcgcagagagaagaggaagagtggtggtcaggagggagcggcgaccaggcaggacgcgtcgagccgtcgaggtggcgcgctgcgcgacgcgtctcgctgggcgagccagcggaggttggaagtgcccttggtggcccagttgcgcctggtgcggccagagattaactgatcctgcctctccatcgtctccgtagggtgtcgtagaggtacggacgagtgcagaaggatacatatggtattatgcagaccaaagcaacctcgcaagcgttggcggatgtcgcaagatcagtgaatgaaggtggcgcaccaggtcggctcgcagcgcgggccacgacgcctacaattctcgaccggcgcgaacatggcaagtactctccccagtcaagcgttcgctcagagggacggaggaaagcaggaacattcccagagagagacgctttctgatctcacggtcagcgtgggccgagcgagggcaagaggctggggagaattgccaaccggaggagggtgcgcgcgcagcgaaactactgaccgtcttcgagatgcacctacagcgctcatcgtttcgtccgtcgtctagcggcggcgacctgctggccttgtgcgactttcgttgctcttgctttgtcaacgtctctcgttcaaaagcgcaaaaaggagacgaggattatcaggccgcgaagccgcaagagaagagaagcatacaagcggctccttcgctctgctcatgttgcccctcgaactgaaccatggattttcaaggcggtcagcagtaattgacgactttgttcttatcgttcgaagtcgattgtcgaccagatgggccggagggaatgaggtcgaggtcggtcgagcacggagagcggcgaggtaggccgcagacacacggatcatcgcgctctcgacacaaacgcgagtgacaatggctggcccggtggaacgggactgcgccagcattgaaaattacctcaagcttgattcgatcttaaatggcggcggtcgcagcagcagtcgcgagcaggcagagcggggccagggacgggcggccgaccgacgagttcgagcaagcagacttgagaacgacatgccgtgacaagcgagtgggcttggcattcctgcgagcacggacgaaggagataagtctcagccaagacgtaggagatccttggacggcggccgacgcacctgctcgctgcgatcgacccatgaggctgatccgagggtgagagcagactgccatgatgttgccggggcgtgtcaggaggatgggccgccggatcacgcagcctgagacggccaaaagcaccgtctgcgctgaaggcgactgcaaggctcgtacctgggtagcggactcgagggcgaaggcggtcaagcacgagcgaggcggcagccgggcgtgcgggaggagcgagctcgtgccgatgaccgtcgaagctcgacgcgccttgacggctggccagcccaggctaaacagcgaactccttcgtcctcttggtcgattgctgatgctaagcgcatcagcacctcctggtctctgggtcggtccggctggtctactccagctcgggaggtgttgcgatgctggcgggggctcgagagcaggcttgctcctccgccggcaggcttcatttgcgggcgggcgcgtcgtgggctacgcgagccctcctcgccttctcgccggcggtccttcccatacaagacaaccggaggttgacgagagctcaaaggtaaacagagcagaccagcattacctcagcgcgaaagcgcgtttagaggccgatgctgctgttgctgccagctgtgtctgtctgctgctgctgcgctcgagcttgacggcgcgcccgacttcgcgacggttcgagctgccgactgccactctcaccaccttcctctcccgcaagagcacgcagcacgccctcttctctttccgcgcctcgcgcgtggtgcgcgtcgctctcttcacccagcatgtcggacgacctgtttgacgacgtctcgttcgcgttcgacgacgccgcctggcgtcagattgacgctctgtcttcggccgccccgccgccgccgccgtcagcgaggcctgtcgccaccggagcggctgctcgagcagctgccgtcgctcgcgcgtctactgtaaacaggcctgtgttcggccaggacgaaccgtcggcggtaacagcgcccggcgacaacggctgcggcgccggtgccggtggcggccagctccggcagacgacgctctttgggacgtacgccccgccgccgccgccacagccgcaggccggcccatcatcgcgagcttccgcggtcgaccacactggcgaccggccactcgatacgcacgacggaccgggcacgcgaggtgtagcttgcaagaccggcaagacctgggaccgagccggcgccgcgcggcaggcggccaaggcggcgaagggcaagggccgcggccggcctggctgggatgacgacgacgaagacgaggccggcgagggcgccgacgacgacggcgaggacggctttgaccaatttccggcgccggcggtcgcgctcggcgcgctgccggccgagatgaagcacgcgctcgactacgacgccgcccagacgtggctctacccagtcaacctcccgctgcgcgactaccagtttaatatcgtcagggccgccctcttccgcaacacgctcgccgccctcccgaccggtctcggcaagacattcatcgccggctgcgtcatgctcaactatgcgcgctggtacccgaccgccaagattatctttgttgccccgaccaagccgctcgtcaaccagcaggcccaagcgtttcccgagacgtgcggctttctcaacagcaggatcaccgttctcaacggcgacacgagcggcgacaagcgcgagcggctctacccgaccaagcaggtctttttcatgacggcccagacgatgatgaacgacctctcaaatggccgactcgacccgcgcgacgtcgtcctgctcgtcgtcggtgcgtggaccctcgccctcactgcgcacgcctctttcgttccgtctcatgtgctgacgacagatttatcttgcagacgaagcccacaaggcgaccggcaaccatgcttacgtccaggtcgtccgctacctccaggcgcacaaccacctcttccgcatcctcgccctgacggccacgccctctggtgcgcctaccctccattccaccactcctaccgcgcttttagctgacgaaggctttggctcgcgttcgcaggcaaacctgagggtgtccagcttctgatcgaccgcctacacctgtcgcacatcgagatccgggatgaggagtcgctcgacctacggcagtatgtccataagaaggtccgtcgcctcctcttgaacctgaagcgcaggatcagtgttgttgacttgcgactgccctgtctgccccagacgacggagctcgtgctcgtccggatgacggccaatgtgctcgagctgaaggacctgctcgagaagctcatgcgcgtgcgctcgacctcaagcagcagtcgggctcctccatcctatgtagatgactgacggctcatcccatctctccctctccccctcgatcacacaccgcagccgctgatggagcagctcgtgcacgccggcatcttcaacggttacgagcgcgatccgacccggctccactcgtaccggtgcctctccctcggcaaccagctcaagcggcagaacaactacaaacacgtcggcgcgctgaagaagctcgagggctacgcccgggcgatgcagtacctcgtacgtcttcccgcttactcggctctggcaactgttctgaccccttctccagctcgagcactcgatcagcatgttccagaccgtgctcgccaacatggtgaccaagaaggacagcgccgtctcaaagaacaaggagctccgcgccatcgacgcgacaatcgagcgcatcaagacccagggcggctacgtcccgcacgccaagatggaccggctcaagggtctcttgcttgagcactttgccccgcgcgagccgggcgacggccggggcgagctcgatccggagacgacgcgcgtcatggtcttctgctcctaccgggcttgtctcgaagaggtcgttgtgcgtcgtctgcatcctcgcaggttttttggcgagagggctgctcgctgatgtgccacttactttggccccgtctctctctactcaggtcatgctcaacgaggaacgcccgctgctgaaggccgtctcctttgtcggccagagcaccgacgccgagggccgcaagggcctcaaggttcggccaccctctccagccatccgtctacgcagtcgctgaccggttcaatcgacaccttcgcactcccttatcagcaatctgagcagatccaggtcatcaaggacttcaaggccggcaagtacaatgtcatggtcgcgacctcgatcggcgaggagggcctcgacattggctcggtcgacaagatcatttgctacgacgcctcgaagagctcggtccgcatggtgcgctgcgtctctatcccgattgagttgccgcttcgctatttcgctgacctttccgcttgacttgatctcagctccaacgcgtcggtcgaaccggtcgaaaacgcgagggctccatctttgtcctcatgggcgagggccgcgaggaggacgcctggaacaaggccaaggacaactacatcagcggtttctccctcgtccgctgtcgtcgcaaagtcaacgaggcctcagctgaccgccgcttgcccgccgcccgcccctccagtccaggaggcaatcaccaagggcgctcacctcgagctctacgacgacgtgccgcgcctcctaccgcccgagatgaagccgacctgtgtgcaggaggtcgtcccgattgaccagactgtgcccgacttttttaaagaggccaaggcgacggcgacgcgcaaggcgagcggtggcaagcagaccaagctgatgacctcgtcgaccaaagtcgcctctggcaagcacggcgtcgacgtccctgacggcgctgcctcgggcttcgtctttgcgcgcgacttgaccaagcgcaaggtcaaagggaccgactcggatctcgaggacgactcggacgacgaggccattagccgcggcatccaactgaccaagccgaagccgtcagcgcccggtccggcgcgctcggcctcggctggaaaggcagtacccgggaccggcaaacccaaagctcgcagcaaaggagccgctctgtccgactcgtcttcaagtgcagaggatctgcctccgcctccgcctgcaaagcgagcacggaccgagccaatgcgcgtgcctgccgcgtcgaggccaacgaggatcgtcgatgcgacgccagcccgaccggccgctcctcctccgccaccgcctcagggcccaatcgagatcctcgacgacgatgaggaagatgaggtaatggtcctgggcccgtcgctttataagatcagggcgccagacccgacctccttccgggccgcctctgggcctatacgtcatcggacgagctcgacgtcgcgcgccctgccgcccgccttgaccgccagtcaaaagcagccaatgacgatcgtgcctcagtcggtcgcgccgccagccaggcagcccacgccccctttctcgccctcgccgccccccatacgttcgtcccagaaagtccaccacctctcgcgctcgccagaggccgacaaggcgccggcgtccgtcgcccttcttccggccgacgtcgccgcgcaggctggctttggcgagatcgacccgcgctggatcctggacgatgatgacgacgacggcggatacgacacctcgttcgtgcccagtcccgttgccggcccctcgtccaagcgcaaaggccttccgtccggctcgcacgagccgcttcgcccgacctcgctccagcacgagatcattgtcgacgagcccgcaacgcctgcaccggccccgcggctgaagaaagagccagccaggctcgtgccgcgcatgacaatgggcctcggccggctctcgaacgaagaaggccaggacctcagctgggtcctccaggacgacgactcggacagctacgactcgccgccggtccagcggccggccaaacggaccagaccaaacgtgactgccgccggctcttcacccgatcaggttcagatgccgccgccggcgagcacgcgccgcctggcgtcaacgctggggaccaacggctacggtcatggtcagctcgaaagtcccttcctcccgacgcagcccgtccgtcggccgggctttcggcctaaacttcgggccgccgtgctctcctcaccggccgactcgcccgagcctagcggtcgcgccagcggcggcggacttcgcaggccaacgacatcatcaaacatcttcagcaccgtgcttgcgcagccagatacaaacggcgcagcgccctctcgccggctgtttgagacgtcgtccacggccaaggagccgacgcggcgctcgaaggacccgtcgtggtatcgcggcgccgttcccgacgacgtcggccggtactacgacaagacggtcggcgacgaccgggccgagcgtcggcggccgcagggtcgagacgttgccagcgaccagtcgtcgggcacgatctcggacgacggctcggcggtcgacgatgaggagacgtcgtccgaccgggcctttgcaggcgagttccagccgacccaggctccgcacggctacgaccagcagcgggcgtacatgcgctcagtcctctcgcctcgcgacggcagtggcgggcgcttcagcgtcacacggcccgggggtgggcgggcaggcgcaggagtgcaggcggcgcggccgctaaggcgctttgaccgggtcgactcggaagggcctgacgtcgacggcggagcgaacgacgacgactgggattacggaacctttgtcgtcgatgacgaggagcctctgatgtacgagtaagtccaaagacgctggctatcatctcatctcttgctgaccgtcgtctcgtttgctccttcaacagtcggagctcggaggcggatgagtggatgcggaagccctgacgacgacctgacgaccttaagactgcgacgaagcgatgaccatgacgtagaccgtctcaaccgcaagtgtgtctcgtcggcaggacagagcgttagatgctacgtgcaccccagccctgcagccaagagtacgcatgtacgcaggtgcaaccgggcgcaaccggcgccggtcgtgcgcgcagccgacgccggccgctcagccttcgaggagccgacctctagacccttcccgacgacgaccctcctcgacataatcaactgccagcagacaatcagctccgcgcgatccggcttcgacctgcgtgcctacaaaggcggacactcgtcggccgctcttctcgctgccgtcgaaggccacgggacgcccagctcgagcgagctcgccgttccctcggctgagccatcgcctctcgaccgaccggccgccttgtctgcccggctaggcgtttgtagctgagcatgcctagaccctacctcctacggaccatctctgtcggttggcgaggcgggtcacgccaggcagggctgtcgccctcgccgatggcaactcggcactacgccggaccacctcctttcgtccgacgagcggcccgctcgacgccgccgccagctagcttgtccgacagcttctacgactcgctccacaacgacctccaggcagaccagattggacgtgtattcccgccggcgtttgtccctcggacgccagcgccgatgaagcacgagcttgaccgcggggcggctctcagctgggtctacccgaccaacctcccgctgcgcacctaccagttcgagatcgttcgcaagtcgctcttccaaaatgcgcttgtcgcgctcccgactggcctcggcaagacgttcatcgccggctgcgtcatgctcaattacgcccgctggtacccgaccgccaagatcttcttcctggccccgaccaagccactcgtcgaccagcaggccaaagcgttcccggagacgtgcggctacctcaacagcaagatcgccgtcctcaacggctcaacctccgccgaagctcgggccgaaatctacccgagaaagcaagtctttttcatgacggctcagaccctccagaacgacattgcgaacggtgcctttgacccgcgcgacgccgtcctgctcgtcgtcggtgcgtgcacgcggcctcctgtcggagcgggcgtcacctgatctcctcaggttctcttcttctccgacagacgaggctcaccgagcgacaaagaatcacgcctacgccgaggtcgcacgcgttatcagggttcagaatccaaatgtccgcatcctcgccctgacagcgacaccgtccagtccgtgcctctgctttcctcgcgctacggcttcaacagttgaccccttctcgaacgtctgcaggcaagctttctggcgtccaggacgtcatcgattcgctcggcttgacaaatatcgagcttctgagcgaaaagagcaatgtgctgcaaccgtacctgcataagaaggtcagcccggtcagcctgataagctctcaagccgtatagcgctgcatcgctgacgagcctccacttgcagacgacgaccgaagtccaggtgccattgacgccgcagttggagggtctccgcgacactttggcagacttgatgcgtgtgcgtcagctcggctggctgacgctttgcgcgacgccatgctgaccctctttcaacgtcacgtttcgaagcggctcatggccaagccagatattagaaggatccttccggccaccgctgcggatccgttgacggccaacgcctacacgtttaaccgcattcttctctcacctcgcagcaggggcggcattaatgcttcggcaaaaaacggtctcatgatcctgggggcgtacgcccgggcaatggagtacctggtcagccctctgaccgcgacttccgctcgtatcgcggtctgaacttcatcctccttgcgtcccgtcgttgcagcaactgcactcgatccgcatgtctgtagacaccctgcttgcgatgaggtccaacgagcgcaggcatgaggatctcaagcgcgaggccttgcggatgcgcggcactgacggctcatacccggcgcatccgaaggcgctggctctgcgccagatgctcctcgagtacttcgcgcctcgcgagacggatgacgacaggggcgactttgaccccgacacgacgcgtgtcatggtcttttgctcgtaccgccgagcgacggaggaggtcgtcgtacatcccatcgaccccagcgaaaaggctagcacctgatcaggctggttgacttgcgctgctccccccttatgcagagccttctcaagggccacgggccttcgctccggccagttgccttcgttggccaagctacggacccttcgggcgagaagggcctcaccgttcgtgatcgctcctgcggcgttcccctaccaaccaccacgagagctgacgtcttgcgtccgaaaccgacctgttgccatctgcagcaagcccagcagcgggcaatcatcgccgacttcaagaccggcaagtacaacattttggtcgcgacctgcattggcgaggagggtctcgatatcggctcagtcgatcgcgtcttctgctacgacgtcccgacgagttcggttcggctcgtgcgtcgccgccagttgcccacccaaagcttgcgggtgccgccgctgattgttcgtgagcggctcgctctcgtctcgtccgcttagctgcaacgcatcggcaggaccggccggcagcgggacggtgtggtgactgttctcgtcggcaagggtcgcgaaacggacgcgtggcagagagcgcaggacaactatgccagaggtgcggctatctccccctttcgcgctgagagatgatcagagcgctgaagctcagcctgcgcacgtgcagtccagcacgagatcaagctcggcgaccggtacaacttccacgccgcgccgcggttgatgccggacgacattgagcccgtctgcgtgcgtgaggtcgtcccgatcgactcgtcggtgcccgactacttgttcgaattggccaaaaaggaggcggcgaaagctgaggcatcgcaggccaagctcgacgcggccgaggcgatggcggcgaggaaggaggcgcgagcggccgccgccgctgagaagctggccgtcaaggcggccaaggcggctgcaaaggcggccgaggtggctgcaaaggccgaggccaaagcggcagccgtcaaggccgcgtaggggtcgaagtatcggccagagaagaccgccgatgctgcgcaaccgccattgggagacgagaccggcgtaagtgagcggccgagggctgcctccagcagaagcaggtgacgggccggcccaatggtcggcggcctcgaacgccgaccgtcgggcctgcgaatcttgatggcagtctgcgtccatccgcgcgtcctccgcccgatcgtcagcatggtctttgacgccagcccaagggggttagctctcgaaagaggcgtgtccctcgcacgacgcgctctccgcagagctcggaccgacgagacccttctggaccgaccgatcggaccctcctccccgccgacccaacgttgcgacaccccccgagcggcagcaaaagaacgccatgggaatcgcagggaaggaagggaagctgtccccgtttaactgcgcggcttctccttcttctccttccagagggcaaggagaccaacgcccgagaccttgacgaccttgaagcggacaccggggatatctcccttggctggaaagatcagaagcaagaggcagcgggagaggcggcgggggcagcagcgggcggaagtcgagagcgaatagtcagcggtcagactcgaggtcaatcgagcgatcctgccagggaatgcggcgacgtaccctttccgcggcgaccgaagcccgagatgaggacctcgtcgttctcgtcgaggaagttgaggcagccgtcgttcgggacgaaggcggtgaccttcttgccgttcttgatgagctggacacggacacacttgcgaatggccgagttgggctgcttggcctcaacgccgaccttctcgaggacgatgcccttggcgtgggacgaaccgccggtcggcgaagtcttgtaaacgttgccgagcgcacgcttcttgtacgacttgtcggcccaccggttctcacggcgcgtggtccggagcttgcgagcggcgaggagtccgcgaggcttgttggctgaagaagaggggacgcggcgagccaagcgtcagccgagctgcctctcaagagcagaacagagccaccccaaggcctgatcccggtgccgcatcccgctcctgccgagcccagctgctggcgctcgtgcccaacggagcacaccagtcgcgtcgccctccgccagcgcccatgctcccgtcgctgcccctgcggcgctttgtctgtggatagcctactgctgttgcagcgagctgaagcaggcttctgcgacgatgccggcagcccagttgccgctcgtgctcgagctgctgcaccggccgcccgcgagctcggagcgaaggagccgtttgcggctggccgggctgggatggccaggcggaccggctgtgggtcggggagcacgacctgaacctggcgggcctggggtacagaccatctcgtgtgctgttccgacctcaggccagcgcaagtccagctccgagagccgcggcgcctgtgcggacgagggaggaacgagaggaggcggtactgacatccctacagagcgggaagagcacagatacgcaagcacgaggtcagcaattctgtcctgctgctctgacagacgtgccaaagggccttaccattttgtcttgagtggctagcgaggaacgaacgaaggggcaggcgagaccttggtgctgcagcgaggcggagcagcgagcgcgcgcgggcgctgtgggcgctgcccaagtaagtgcccagaatatgggtatgtttgtgggggtcgtcttcgccgcgcgcattttgcgagccggccctgaaccagcaactcgagtcaaagaagcgcgagacgaattgcaaagctccaaaaagagaaacaagtcggaaggaaacgtacaagggcaggacagagggctcgggtgtaggctatatgcacagcgtctttctcttcttcatgcggtccctttgcaggctcgaggggcttctctgcgaacccagcttcctgcaagcccaacaacaatggtcgtaaaggaggatcgtctatagtcatgtctgtgtgcgagaaagccctccgagcggggctgtcctctagaaagtgaagcggaaggagagcgaggccagcctcacatcgcctcgacgccgacactccgctcaaagccggtgccgccgccgatcgacttctcgcccgagccgagggcgtcggcgtactggaactggccggatgtctcgtactatgaaggggatgaggggacggcagtgagtccatgtgtccatcgctccgagacgcttaagaggacgccaagggaaccggggcgcacctcgtacatgtcgacggcgacgatgcagctctcgcgaacgactgagggcaggctcatgtcggtcgagagctcgcgcagcaggggcaggacggtcgggtctggagggagaggggaaggaatcggccgggtcagtccaggtttgatggttcggaaagacggaagagaagtccgcaccctcgccctcgctcgcaatgccgccaagcgcctcggcgcactcgtgccggaccatctcgccctcgtcagcgcagcggagccgctcgatcaacgccggcacgctgtacttgctcgtcagctggccaaagacgtaggcaatttcgtgcctgaacagcgcgctcgggtccttgaagccctcagcgagggcgaggaccgacgcttccgacggcgggaggttgcggagcgagaacatagcgcggtagcgggtgaagagcgggatcgagcggtcgaggagggtcgccttgagttcggcgactgacgtcgtcggcaggacggtcggcccgcgcgaagggtcggccatgggcgagggcgcagggacgtagtggcccggcgcggggtcgatcgtagcgaaaggcctgcagcgaggtcagagggggacgacgcagggcgtgagtcggcgggatcgacacgcgcagacagccgaaggaagagccacacgcacacgctgccgttatctttgctgagccgggcctcctcgagtccctcgggcgagttgtcgtactcaatctttgcgatcgcaatctcgcacgtctcgcggacctcgacatgcgcgtcgtcgagatacttgtgcaggacagggagcgagtctttgtcgccgatcgcgccgagcgcctctgcagcctgagagcgagcgagagagcgatcaagtgaatcaagggggagaaggacaagagtcaggacgagtgcgcgacagtgagcagtacgcatgcgcggaaggaggggggctgctgcgggcccagccaaagcgcgagctgagctgccgccccccctcatcgcgcctggatgcaggtgagcaagacgcacctcgtgccggaccatcgggtcctcgctggcgttctccaaaacggccgagaggatcgggcaggcctcgacgagcttgagctggccgaggacgtacgcgaactcgtgcttgagcagggctgaggggtccttgaagcctgcggagaagccggggcaaggcgcgcacaagacctggtcagctcgctgctcatgatcgaaagctcctcgccaaagagcaggctgctgctcgtgagccaggccaagggtcgcaccctctgcgacgatccggatggcctccgagccgccgacggccttgagcgtgaagagtgcgcggaagcggttgtggagcggctcctgctgcgagaggagcgtctgctcgagcttggcgagctgatcggccgagacctgcatgatgactctctgggcctgtgtagaaaaggcgagggaagggcaggaaggcaaacggtggtcgtcgttgatggtcgattgaagctcgatccgccgtcttcagatttcgtccccgaacccggcttctcaagcggggcccctcccgaaacctgctgccttgcagccgctcacatctaatctagtgctgtgccatggatcgtcaaaacgcagcgtcctacggctgaagactcagccggcggagctcgcgctcgagtcgctcgcgcgacgacggctgctcgctcgtctcggccggcctgggcgggtcccggatcttgttcttctcgaagctgcggcatggcgcgaggtagatggtcagcgggctggaagcagggcaataaagcgccgacaacgccggacgcacaggtacgtgagcaggttgaccttgtcggccgtcaggcgctcgagcaagctgaagacggtcgtctcgtcccggatgctgttggtggagtgcgaccagggagagagcagcgtcaaactcttgcgaccagcggctgcttgtcctcctttagagggggattgaacgtacacgagctgagcagcaaggatggcggtcgctgcgctctcacgaacggcgaggacggacgagtagagcccctgcgatcgacgagagatgtggtcagccgcgcgactgagatcctggaccgagggcagagacgaggaccgaccggaagaagtagatcgcgcagccgaggaagctcctccgcgacgacctctgccggcagacggaggagcgtccggccgagcgcgagcaggccgaatgcaaaggccggagcggctgcttcggcgtctgtgcgctcgtcgtcatcgactgatgcgctcgatgctagcgaaagcggtgggaagccgaccggaggaacgtcttctcccgcggcggactgcagcgaaagcgacggagaagggtcgacgagcgtcctcagactcgaaccgagcgtatagagcgcgacgacgggctcgagcggcgggccgaggacgagcgcgagcacatgggccgagccttgcctgagaaccgggctggctggtgataaccgctggcggcgccggaggtccaggagcgcagagacgagcgggccttcatgcccttcaagcagaggtcgctgagagacgggataggtagagttgatggtcagcaggggcgacgccggctgaggtgggaggccggcgacttgaggacgcacctgattttcgacgagcgcctcgagcagaactagataccgctcgacgctatcgctctcagtagcggccactgacttgaccttgagcgcgttgaacagctgctcgagaaggtcatcgaaaaggccgccctccttccacgtcgcggccgcggccgaggtggtacgcccgcgctcctggtcgtcatcttcgctgtcgtctaggtcggccagttcgagccggtccttcgagcggggcgtcgagtggccgacggggtaagcagccgaggaagagaggactgcgccgaccgactcttcggaagggaggtcgtcgagcgttgcccgtgtgagtcgcgctggcgacgacgacgacgggccgctgaacgtaaagccagccttgagccgtcgccagtcggccagctcgcgctgctcgcgcccgtcaagaagatcgcggtgtcttagactgctggcgctggcggaatccagctgagagcgtcggccgagctgcagcgaagggacgggcgaatcggtgaaggcagcagcggcgcggagcgctgcgcttcggctagtcgtcgtcggttggtgggcgagaggcgtcgcaaaggcccgttgtgaactggcgagagcgccggcgttaggcgtcgatgggcgaggagcttccgccgcggggctcgtctgcgttggccggagtggagtcgaagaggatggcgacgggtcggcctcggggacggccgaagatgaaggcggtgatggggcttcggacggcctcctagcggcagagcgaggtggccggatcggggttgaggttgaggccgcactcgcagctgccgccgggctcgaaggcgcccacggcgagggaggtgctgtcttgtccgtcgtcgtttgtgccagcggcgacatcgagggtgaggatgaaggttgcgtgagcggcttggcgggtgtcgaaggctgagacggcggcagtggggttagatcgcggtcgagctggaccgccgagggcgaggtagaggttggcgcagcttcgacgacaggtgccggcggggacgacggagattgcatggcagcaacagcagcggtggatggcgagcgtgtcgtcgacgaagctgaaggcgtggtggctctttcggcaggcgtagcagcgccgttctgcgagcgcggcatcgaaggctggcttggaagtgggccgtctgggggagcagcgctgtcgccgccagatggagcaacttccccctcagcctcgtcagaggcagcagcagcagcagcagctacggcccgagcagctgccgcctgccgggcgagttcggccttgcgctgggcgatgaacgacttggcgcccatcttcttgaccggcaccggtggggcctgctgctcaccgccaccgccgccggtcggatcaggctcagctgcgagtgcggctgcgggcgactgcgagggcgagcgtgcgctgctgctgctagaggaaaggatcgggtaggtgtcgttctccttgatgtcgaggcgcttctttgtcgacggcgagaggggatcgatgaagctgaggttggccagggcaaaagaacaggtcagcgagttgagccgctgctgttgaccctttgaacgaggaaagggcgcacgccagcaccctttccggccaagtccgcttatacttgtcccacagctccctcgccgccttccgcacctcgccatctcgatcctccgccaagccccgcaccatcccttcgacctcctcgacccggcccccggcgcgccagccgtcgaccgcgagcgcgaggccggcgcagactgcccgccggagctttgggttggcgtcgcgcgtgcaggcggagaggtggccgatgagcgggccgagcgggcaggcgcggaggatcgtgaacagggcgtgttcggcgcgctggtcgggggtggccctggagagggtcagcttctggccctgaaaaggacgaatgcaaggacagccaaggctgcacgacccgccccacacgcacctctcggacgatattgttcgtccgccggatcaggtccagcagaggtgggatgtagacccgctggagccgctcggagaagtcgcgctggagcgagacggcgatggcggtgacgagctcgacagcgggtcgggagagggcagcacgttcggagaggacctgagtgaacgacgggcagctcgaagagatcgtcagccaacggggtttcggagccgtcacggcgccgatgcacgcgagcaagcgagagcgggaagacgtacacactggacgatcttgtccccgagcccgccctggtttgccggcccgacggcggcaggaaacgactcgagcttggccgcgccgcctcgggtgagggctgcgagcctggtccgagcggtgcaggtcggctctcgtcagctcgtcatgctccctcaagttcggccaggcgaggtcggtcgcctccctgagctcaggaagaggggcgcaacttgtcgagcgcctttgcaaacttctcccaagtgtgttccgactcaggctggaggaagagcgtctggcaggagtcgacgtgcgctgcgagctgggtcggtgacgagcactgcgggcggtcggtcgtccatcggcacgaggctaagcgatcagtcaaccggcaggatgtctgcggcgtcgtcagactgctgggcattgcacgtacgtgaatttgctcgtccgagtccttgaacttgggcgccatcgtgcgtgcgttgcgtgttgtcgtcgttgctgttgatgggaagagagggagtcggaggacgaaggcagcgcgacttgaccctcgagtggccgagcctgacactaagcgagacgccaggctcgcaaggggtcaggtagactgtcgactcaagacgaccctctcgtcgaaggagagaaagagcaagcactctagccatgtgggatgaatcgaggaatagagcgggcctggttgcgtccagcttgacccgagcttactctgtcaggaaactctgtcaggaagggccgttttgacagaccggccttccgcagcatgcttctcccactctcctcgtcattggctctctgcgcgagtatcatcgaccatcttcatgcgagccgagcagctcgcccagcgccctccgcctgagcgagatgcgcaccggcgcacgagcgctcgtgcctgcttcagacggcatcagcgcgtccttgcctccctcggcctccagccctccctccttctcgccatcctcgccggcgagagccatctcagcctgcccatccagcagaggcaattcgatcctctcgaccccgctcgtcagcccgcccttgagccaggccgcctgcgcacgctcgtcgaccgcccgggcacgttcgaaccgggcgtagtggatcgcgtagagggcgagctcgacgaggaggacggcgacaaaggcaaaggcgctgaggaggatcgactgaagggggagtaagggaaaccgtcagcgagcggacgatgtagaaaggtcaaaaacatggacagaccttcgtttgagtccacttatgcccgtggcctccgagccagtagacgccgcccgcgacgcctgccgcgctgaacaggacgttgccgaccatcccgagctgtttgccaaccgctgcccagtcctgcccgacgctcctctccgggcgcgcggccggctgggcggagggcgggaggtaaggcgagggctggagcgtgtcggggttgagggacgcaggtggcggtgggcgcgtaatggacggcgggaggagggtcgtcgtggacgagaggagggagtggggatgataggccgagggatctgacgagcagcgagcagatagggagagcgagaagcactcagtgtcgtcagtccgacggctttggttcaaaggcgaatgagtgacgaagcgacacgtacctagctcggcctctgtgagcgcaagacggccctcggggctctgcgtccaccacccgagcctcttgacaagatcgtacgacacgcccccgcgctcatcggttgacttgatgccctcggcgctcttgccagtgccgtccgatgggagggcgagaacggtcgcgagctgctcgagcaggtcggccggcggcctggtcattgtcggcgctgcatctacccctgctgctgccgccgccgtcgtcgagagccgcaattcgagcagctcagaaaggagcatccgcaagtcggccgtcagaacgacctttgtttcgcccaggctggccatcgtttccgagtcttgtgcgttacaggcgggcggtcgtcgtcggagggtgctgcgctggctagcgggcccgagcgagcgggtcgggcgcgcgcgcgcgcccgcgtggacgtggctgagcgttgcttccccctgccgccgccttcgactatccgaccgacctcgactcttgtcctcaaagaccagagcagacaagcacggtcaagccagtggacagcctctctccctcgctcccggacgccgtctgccataaattcgatcgctcactcgctcgcttggatcgtttcggcgccgcgcaccttctcgcccaacccgcctttctcgcgcgtcccgccgggtccatcgcttgtccttcgtccgacgcctccctggcgcaacccgttcgcagcgccctttataaaagcgcggagcaggggactcttgctgctgagcaagtcccatgtcgatctcgtcgcggtccacacaacaggcactggcgcatcctgccgccccgccgccgtcgacggccctccctccgccgccgcctccgggcccgcctcgtgagccgcttcgcacttgagccctctcctcaaagctcatatcactgacttgtggtcgcttcctatgtgtgacgccccgccagcgtccgagccacttcctcctatgcccggagctttctccctcggccgctcagcgagcgcatcctcctccgccgcgattgccggcaacgcacgaccctcgagccgctcgacttcctaccgagttgcgagccaacagcagcagcagcagcagcaggttgcaaatcaggctcggccgagctcgccctatggaggtgtcccctcctctcggcagacgctggccgctgctgccaatggagggctgcaactcgccccgcgcgggccgagcacgtccgccgccgtcgccgagtcggccagcccatacctcgcttcctcttccgcgacaggctccctcggccgagccggctcgcagcagagccgatccgcgtcaggcgcctcgcactactccgtctcgcctgcgttgccctccgcctcgtcctcctcgagcacgccgactggcgcgcagctccagcccaagcctcaacctcagcagcgcctgccctcccgaacgctcctccagcaagccctctccctcgcccaacaggccgtccagctcgaccaagagtcgcactttgccgacgcgctcgccgtctatcggacgacggtcggcctgctcgagaaggtcatggagcgcgtcgaggcgggcgagcgcaggaggagggagagggggcagagcacgacgggcggagcgggcgaggaggaaggcaggacgctaagagggatcgtgcgttacttctcgctctctctcggcccatcaactgatgggtcgacgttgggcctgtgggactaacgacggcggctgctcctttgccgcagtacgacgcctacacatcgcgcatcgctctcctttcggagcagctcgatcacgaggccgagacgcctctctcgtccccggccctctcaccctccctctctagcatagcagctcacccttaccagcagccctacgccgggccgtcgattgctagcgcgaaccgctcgatggccatggacgggggccaacaacagcgagccgaccaggcggcagcgtacgacgggatcggatcggcgatgctgtcgacctcgagtagctcgtcggcgacgtcgctcgcctcgccgacgatggcgacgacggcggtcggcaccgcgtacccttatcaccggccgaggccgccgtcccagctctctgcgtcgtcgtcacactcgcgcaaccagtccttctcgggcccttcgacgacggctggcggcgaccagggagggagcggcggcatgagccatcagcgctcgacctcgcactcgctctcctttgccgcgcctggcccgcctccctcgggccctccaccgccggccccggtcgacggagccgaggctgacctccgtaggcaaagcctgctcgactcgctcgagctcagcctcggcccgccgggatcgtctgcgggcggcggtggcggcgggacgggcgccggccggagagcaaatttcgctgcaagtgggggctcgtccctcctgctcgagggcgtcgtcgaggcgcccgaaggaaacgagctttcgagtgacggccgagcgaaccgccaaccggcatctacgctcggagccaactttggccgccggccgtcgtcccgagctaccggtggcggcgggtcgatcgtcctcgatacgacggacgaggggacgatcagccagcgccgcaaggctggcaacaacggcggcagcagtggcagcggcttgcccgatctctacatatcgggcgggagcagctcggcccagagctcgacatttgagatcgaccggccgagcggcgcgcgcttggcgggcccatcgtccgctgccagcgtcggagcaggagaagagccgctgattgcgtcgtcgtcgacggcagcatcgtcctcgtcgtccataacgacgccttcgccgacgcccctcccaccagcagctctgacggccgacggcccctccgcagggccggcgctcaaggagaagtcgagtatgtttcgactacgggcgctctcacagcctggccggcggccgacgaacggcaccggatcggacagtggcgccatcccgcccgtgccgatcatccagcgcaaggcgtccttccccgcccagcaaccctcaacgtcgtcaggcgtcatttcgcccgggcggtcgcttgggccattcggcatcggccgctcggcctcgagctctggcgcaggtggcggcccaggcagtttgcgctcgacgagcgcccgctcggccgcgagctcgcgcgaaggctttgaccactattcgggctcgctcgtcgtcccgccctctccgagcgtctcggtccactcggccttccacgtcctcggctcaaagacgcccgtcggccgcctgaccgcgatcgtcggcacgccggcgcatgcgccgctcgcgcctgaacggccgccggccgagctcctcctccggccgttccacttgatgcgcctcctccggcggacaatgacgacccccggcggggcctacctctcgaaacggatgcacgttgcgcccgagacgtggacgctgatgggcgtccaccttccggcggtcgacgtcaaggtcgaggcgatccagcagctcgccgacggcctgctcgcgctcgaacgggccggcgcgcccttcctcgcctcggcgaccgtagggacggccaagctccaggaggccgggcgcgattttgcaaaggcgcttgacggctttgagaggctgattgacgacctccagctgacgctcggcaagaagctcagcatggagtttggcgggcacgtaaaaaagtcgtcgggcgtgcgtcgtcccctttcctgcgctctcgtcagactttatcgctcaagctgaccccagtccattcgcatcagtcaatcatgggcctcggcaccaagctcacgcgcgtgatggagaagaagtttgcctcgggccgaaagtgcgccctgcgtcctgtggatcccgagtcgagcagtgatgactgacagctccctctcctctgccacagcgtcaacacagtctatgtcgaggacctcaaccgcctctttgcgcaggttcaatttctcggtgcgctttcgccctctcttcttcccctcgaatgagcccggccgctgaccgcccctcctctccctcgcagacgagcacctccgcagcctccttccgagcggcgacccctcctcgccctccgcagccgcctaccacgccctcaccgcccctggccggacgcacatcgagcagcggctccggcggtcggccgagtttttcggccaggtcgtcgtcgtctttgtcctgcgcgaccttgggctgctctgcgacaagtacgcaaagagcgtcgacaagtggctgatggactgagccccgggagcggttgatcactctcacccttgcgtccttccgagcgccttcggcccggcggcctgcttccatagcagacgcatgcaggcaggctgccagctcttgcctctcctcaggctccaccccacgcaccccacgggtggtctgcacgcgagctctcgctcgcagcctatcggctggaatggcccggagatctttgctgtagttgaatgctgcccttctgagcgacgtcggcagggcaaagaaaaagaaaggcggggagaaatcgaacgactgctgcgcgcgccggcggccgtgtgggcgggcgcgcgcgcgcgggggccgacaaacaggcggccgccctctcgctcgctcgcgtccttcccttccgccaaccccttcaagcaaaagcgcagaccatggcctctgtccagtacgctgcccagcaccagctcaatgcgacttcgtcggcttcgtcgtcctcgctgctagcggcgacgagcgcttgggacgccaggacggcggccggctcggccctcgccctcgtcgtcacgcttcttgtgctcgagcaggtccgtccacccgaccctctgtgcgctcgcctcgagaccggctcgctagagtgggccggctccttgatggcgcctgcgtagtcacccgcatgtcttccaaggagttcatggctgatccctccccttcttcgcctaacctcgccgtcgaccctctcctcatccctccttgtccccaacgcgcccgttacagtggcgctaccggtccaagaagcagcacctgcccgggcccgagtggaccattccggtcatcggcaagtttctcgactcgatgaagccctcgatcgaaaactacaaggccggctgggacctcggcgagctctcggtcgcgagcgtcttccacatgtgcgacccctcccttcatccgtgcaccttccttccggctcgccctgtgccctcggctgatacttggcccggtatcggtcgctcagcttcatcgtcatggcctcgtctaacaagtatgcgcgcaaggtcttcaacagcccgacctacgccgagccctgcctcgtcgcctcggccaagcaggttctgctcgccgagaactggtgcgtcctccatccagcacggcaggctgccgagcagagcgctcggtgcaggccgagacgctgacagttttctcttttgcctcgcgtctcagggttttccttcacggcaaggagcacgccgactaccggcgagggctcaacggtctcttcacacgccgcgcgcttaggttcgtccgaggctgacgtgggactctcgagctgtgcagactaacatgctcttttactcgccgctctccccctctagcatctacctgccgatcatggagaccgtctacaagagctatttcaccgagtggatggccgactcgggaccgcccaaggagtgcgtctgcactcggcgctcgcttccgaatgaggggatgctgacgtttcgctccctcgcaggtacatgatgccgatgcgcgacctcaacatggaggtctcgctccgcgtcttctgcggcaagcacatctcgcccgaggacgagcgcgcgatcggcgagaagtactggctcatcacccgggcgctcgagctcgtcaacttcccgctcgccctgcccggcaccaacgtccacgccgcgatcggcgcgcgcaagattgccatggcgatcctgatggacgtcgcggccaagtcgaagctttcgatggcggccggcgacgagccgacgtgcctcgtcgatgcctggatcaagtcgatgattgacgcccggacgggcgccgacgggcccgacgacgaagagacgcgcaaggtcctcgtccgcgaattctcggaccacgagatcgcgatggtcgtcctctcgttcctgtttgcgtcgcaggacgccatgtcgtcgtccatctgccacgcctttgagctcctggccgaccaccctgagattctcgcccgcgtccgcgaggagcagctccgcgtccgggacggcgacgtcgacaagcccatgagctttgagatgctcgaccagatgacgtacacccgggcgactatcaaggagtcgcttcgcgtcctgcccccggtcatcatggtcggtccctcggctggccggcggcctttcattgttgcttcagcgctgacactctcactgtccttgctcgccaggtcccctacatgacgctcaaggacttcccgatcaaccccgagtacaccgttccgaagggaacgatgctcatcccttctatctggccctcgctccacgacgccgacgtctacccggagcccgactcgttcatccccgagcgttggctcagcccggacggaaaggcgatcgaggaccccaaccccaagaactacatggtctttggcgcgggcgcgcacaaggtacgttcctcctctcgctctctcctctcccctatcctcttctcttggctgacgtgcctcgttctcgattcgcagtgcatcggcttcgagtacgtctactcgttcatgattgccgccgtgggccacgcggccatctcgatgaacttcgagcacgaggtcacgcctgagacgggcaagctccaggtgattgccaccatcttcccgaaggacggcctccgcatgaagtttacgccccggtcggcgaccgccgcctaagcgccgtcccgcgctcatgccgagcgccgcccctccctccttctccactctcccggtgtgcgcccgttcgcccgcccgcctgcttccgcctcccttccatcacccctgccccttagcctgctctagaggtcaatggactcttgcatcttctcaccttgtctctcgtggtcttttttactatgcccttctggatcgtctttgggccttcgtgagcggggtccggcgccaagggcgaggcctgtgccgctccctgacgagatgcggccggcttgcgaggctcgaggtaagagaggcgaaccgatcatgcaataaacggtctctatgaggcgtgcggggggaaaggatgagtatgtcgtccggtcgtgaaaggggggggggcggcggacggacgaaaccctacctggtcgttggccgactggcgttttgagggcggatgcgacctgccggccatcgactcggcttgtcgctccctagcagctcgttgcgcgtcgtcggcggcgttgtcgcgagatcgtgcagccggcgatagtcgatcgccgtacgaccgcctcgccgtcgtcgtttgctgcaagcgccatttccgtcagttttacgagattatgcaccggtgcagcgcaaggaaatgccctagtgggtagattgacagtcggcctgtggcaggagccgcttcgatgaaccgaactcaagcttgagggggttgaaagtgctgcgcgccgctcaagccagtaggaaccagtggaggcagcgacggccgaccatgctccttgacgtcgagcgaccgctcgcatcggtgggtaaagagatctgcagagggtgtcggggaggatgcgaaatcgctgtcgtgagggaggagggacgagcgagaagggacgattgcggccagcccggctggtcggcggactggcgttgggcgcgtcgcgttgtcttcggcacgccccggcccaccgccgccgtcgccggctctgacgccaacgtaggccggaggatccgaacgctcgctggagtagcgggacgagcgggtgatcggagactgaacggacgagagcacaacgtcagccgatgaggttcaaggatagagaagaaggacgtcgggtcggctgcgcgaccgaccgtcgcctgacttcctgccagagatgcacgcccgaagtctcaggccgcaggagtgactcacagcagcagacgagcaccccatcgacttcctcgaccagctcgctctcctcctcgtcgagcatccgcttgcaagccctcgccgaccgctcggcgcccagctcgtcgtcgatcgcgagcgggccctcgcccgcggggccggtcaggaacgacagcctgacgcccggcggccggctctgttgagtaggcgctcgagcgagcggatgacggagaccgagctgttaggtttaaggacgagaaggtgcatccttctgcgggatgtgcgaggccgacggagggaggtacaggcagccccttgacaacggcacgtacgcaggttgctaaggggcggtcactgactgcgcgtgcgcgcgcggaggatgacgcgggcggaggtcgtgctccggctagcagtcaaagcagcagcagcagcggcccatctcccctccctcctagccctcacccactccgacccaacctctttttcccaaccgaccttaccctctaccaactctcttctcatcatgcctgttgagcccggtccgtctactcgctggcaacagtttttttcaaaccgacgctcgactgaacccctccccatctgcaggacccccctccccctcgctctcctcgaccaagccgctcggcaagggcgaggtcggcggctccgacgcccagggcgcctctgaggcctcgcagcggcccgagtacttttccggcaaggacggcgagcaggccaaggactacaacgacggccagcaaaaggcgggcgagtccaagggcgagcacccggccgagaaggcggccgaggccgccgagatcctcaaccgcaaggccgacgaggacaaggcgtgcgtgccgccagaggctctccttccttgggttctccgctgacagacatgctttgcctctgccagctcgcgcaccaacgcctaagacccctctttctacgctgtgacgcccttgggccgccgcgagctccacgcctcggcgccggccctttcctcgtgtatcgattagatttcgctcctactctcaccacgcctggacattctaagcaggacgatcatgcaagaagtgctgctcaggcagagaccgactcctcggcctccgcgtcggcttgggcttgccgagcatccagctcgacctgaagagcgagcgcctcatcccgctcggggacgttctatcaagccggacgcgagagcagagcgggacgcggggaaggaggagcgagaggcgggctgtcagcgggtccggttggcgaagaagaggtaacagcgctcgaagcagacgcacctgtctgacgatggtctgcaggtagtgtgcagccagcgcccagttgggctctctcctcctcctacccactcccccctgctgctcacgttcaccctcccccgcatgcccgtcaaacgcgccgacctcgtagcgcgcgagaaatagccagccctgggccatctcggcctctggcctccccgtcctctgcgcctcgccaagcatcgcctcggtccacctcgccgcctctggaaaccgcccgagcgcctgcgcgagcatcgccagccggtggaggatcgccagcggcgagtcgccgccgttctcaggcgcgtgcagggcccgctcgtagacctggagcgcctcggctttgcggtcggtgttttcatagacttggccgagggcctgccacatgcgcgcatcggccggcctagcagaacaaggacgcaagtcgtcagccgtctgaggagcggcttttgcggagtcagggggagacgcaccggagggccgtcgccttgttgtagtactggatggcgtattgcggcatgtcgagcagctcgtacgtctggccgaggccgtaccatgcccggaagtcgcgcgggttgctatctgcgtcgcgaacggtcggccgattggaggtcagcccgtctgttaacttaaggcgagaaaggtaggcagacacaccgactgcccgccggtaggcctcgatcgccgcgtgcgagttctgcatctcgatgtactcgtggcccatgagcgtccaggccggcgaatagtcgcggttaagaaggacggcccgacgaaagtactggatcgcctttgcatgctcctctctcgaggcgtagaaattgcctgagggaacgaggggaaggcttcagcaaccgaggaggggtgcgcggcaagcatgaagcctggcattaccgatcagcgtgcacgtctcgggccggtggcggtcgatgttgctgtactccttggcgagctgggcgagctttgtgaatttagggaagatgaagagcatgttcgagtagtcgtcgatgtcgtcgagccgatacgggtcgagcctctggacggcgtcaaacgaggcctctgccgttccaaagtcttctgaaacggaagggcgtggatcagctctgaacctgctggccaccctctttgcggagccgacgacgcacctcggacgtggtagtcgatcagcgccttccggctcgcgccccagatccacgtccggccctcgcgtcgaccacgttcggtcaagccgatactaaagaccgaccgctcgagctcgtcgacgagctctcccacgtctttggcctcaatgtgaaagtcaagccgagcgtggatctcgaagcaggtcgtgaacgggtgcggaggcaggaccgagaggatcgtctcgagctcgtcggatgaagagacgcaggcagtgaggccgacgtaggccgaccagttgcaagcgtagcctccgatcgacttgataaagaccgtcgctgcttcgggccgccgtcgcaggcggaggaggatggtgccctttctgcaaaggattcgtcggagcaggccgtcagccatgctcgagcctgtgcagcacatagcagaggacgaacaagtagagcaggaacggatccgacgcattcttgagttcagtcagaagcggctggagcgacgcgcccaactgatgtcggtcgtcctggccgcctgttttgaaggcgcgcacatattcgtcagcatggtcgcccgaaacgtccgatagaaggaaggacgcactcatgacatcgcccagactctcctgcatgcgcttatcgatgctctgtgcccgacggcgtcgcgtgctcaggagtcagtgtgtgatcttgagagcgccctgcgccctcctcctgctcgtgcgagcgacgcaccaggtaccgcgcataagccctcaggaaggccgccttgacgcccgtacatgacgtgagcgtccaagcgcaccggtcgagctcgcgcgtctcaaagtaggcccgtgcaaggtcaaacgtgtcggcgtcttcgacgtcggcttccgtcaggggtagaccggcgaagctgccgctgctgctgccgccgccaagggggtgcgggctgtcgagcaggccgagcgctggcgattgcggaacaaagtcggacggcgacatggtcgagagcgacggtcgacccctgtggaagtccggcgagcggagatggtttgcttgaagcgggtgtgctcctccgcctacggtcgacgacgaggcgaccggtcgcgacggcgttgaggtatggaacggtagcggcatgccgcccgtcgccgacgccgggccgaagccgttcggcaggagagcgtctaggccggctggaggcggcatgcgagcctcgacaggaatggcggcgaggcattcggctgccctgcgacgtcgagatcaccagcagggacgaggtccggtcagggccgagctcaagagcgcgggacgagctccctgacagtgcctaccatttcgacgcgacgagaagcccacgctcgcggcagtctctgatggcttggcgcagctcggaggggaagctcatcccggaagaggcagctgcttgaagagagatgggttcggaggcgaggcgagacggacgaggtcgagggctgaagtcaacacgtcgactggctcgcgcagagacacgagacgacgcatgtcgttgcgaggtccggtgccaggccactcggattcatcgacctcgcttcagccagacgacccttgtgctcagcgtagagctgcctcactgcctgccgtctgacgagcagcctgctcttactctcagagaggctccagagcggctagtagtctcgatcgaggcgtccccagcttgactccctcttcatcccttcccgtcccaccccgcccggcctcgacggcggtccttttggcaaagagagtggtaaggtgggttcatcgataggtgggcgtaagaaaagtcaaaggagatctaagcggcgatcgcagccggttgcggcgcttccggcactgagagcaaggaagcaagcagcaacgggggtcagccttcaagcgacctggtgcactgtcggctcaaaagcgcagggaacgtactctgaggcatctggggccgtgtcatgtcggcaaagaagagtttcgagacgaggaagccggctccctcgatgacgccgagcaggatgccgcacgtcacggcaccgattgctgcccgcttcgggccctctggagggggggaggagacgcgatgggtcagtcgcttatacacggtgggcggcaccggcggtagcggggagtgtccagttaggcagtctagacgtacctcggcaggcaagcgtgccgccgacgaggaaaccactgatgatggcgttccacgcatcctccttcccccggtagcccttgacggcgcagtcaaatgttgagaagagacctgaaacggacaacgcagaggttcaaggtggaggggtcagtgaccagcgacatctgctgtgaggcgctcgctcgaggccaaggcgaagcacacacctccccagattccgaaattgcctgcgcaaagatcagcagagcgtcagcgaacgaatttcgcttgaatccaaactcgccagaagcgaggcgaacagctcctgatggaggtgacgcacctccgagcaccggtgcccgcgccttgacagctgacagcgagccgaccagccgcgagccctgcgagaaggcagtcgaacagaattagcgggcattagcgcaactccaatgagctactggcgctgcccaggcaacggcaggtcgtcgggacgtacgcggggcgagttacgcgctcccttgacggcgtgccagattcctccgccggcaagacccatgccgctgcagaccggtcgcaacgctgctcgtcagtcgactgcaaagctacaaacgcaagcaggtgatatggccgactgacaaggctcctccggcgtcgttgaggatgacccaagggctggcggagggtgtaatcgaaaagtggacggaggcggagcggaggacgaggtcgggtcggacgagcaggggtcgagggaggcaaggaatcagccgccagctatcgcagagcagcctgaagtatctaagccgcaccaggggtcgcgggtgtggtctccgtgggacatggcaagctagactgaaggggaaaaggagaagagagtgcggcgaggaggggagggggagtggtggaagtccggggctggacgcagcgaaggggcagagcggccgacgtcggccctgccgattcggaccttttggacgctctaggccgctgcaccagcaaggacccgaggcagatcgccggttcgaatccttcgtcgggcaacccttcttgccgcgttctctggccgcgctgccccgctcctgccggttcgtctcctcgcgctccctgccaacgtcgacccagcttcccctcccaacccgttgtgagtcccgttccgagcacagacagacggctgacctgctctgagctgagcaacgagcaccattctgacgcctgtcctgctcgtccgcctgccgtcctccctctcttgccgcgtttgctccgccgcgcccttcagcctcgcccgtctgccgcccgacggcttcgtgtacgctcctctcgccagttagagctcacacgacatcgcacgagccgtcgcgcatcagtcctgaaccttggtgtcgaccgcggactcagcgccctcaacaagcagctcgcgccgtccagcatgtctgtcccgggcaacaccctgcctcctcgtccggcccatctgccggcgcctccagccttcccgcctccgccgccgcctccccccagccgctccggtggcggctatagctctgagctcctcggagagccctcaaggcgagacgaccgtcgtgaatacgatggtacggtctggatcttgcccgcctttcgcggtggctgtggtcgagcgagctgacccacctcgtgctccctggacatctcagaccgaaaacggcgacggtcagatgcatctgacgatcggcgcgatatccggccgcggatcgatgaccgggaaggtgagtctgcgccgtgcccctccgctgtcccctcagccgagctcgcgtactgactgagaccgacccggagcagagcgcacgcgtcagagcgcgccgaccatcatgcgcaacccagaggaactcgagaccctcgtcggcaaaaccgactggtacgcttggttccgtgcgaagcacccaagagaggtgagctttatgctcgacaatgagtgaccctcgatgaacttgcgattgaccgcctgactcgcctcgtcgacgcaggtcgcagaggacgatgccttggagagattcgcccccgctgagggcatgccgcaagtgacgcgcggccagcggatgcaggatcggtacgaggcctaccgcaagcgtttcgttagccgccaggtgcgtctcgagccggcgcgcttgaagctcgcgtcgattcgcctctctgacaaccaagtccttccttctcccgtcagctctacgcgctcttcctcatccacaagccctcggcatggttcgaggagcgctactcgatgacggccgagaacgtcgcgcttcgggagcgcgtccagaagcaggcgcgcgacgggctcgccgagcactttatcgccgaggtcaacgacggccgttgggacgccgtctcgtacgatctcgcgtcaggtctgtttgctcagccgcttatgcatgtcctctgcctaaagctgacatccggcctgattctcctccgaccgcaagatggtgtcgaccggaccgaacttgcgggcagcggggcctcccagccgaagcccgagctccaggctggccaggtggttgtctaccccgctctgaaccagctgcacatcagtggcctgccggtcgacgcgtcgcgcgtcaagctcgaggaggttcgtgcattgcgtctgccagcggctgagctctcgtccgcttgaccgctgacccgccctctgccctactcagacttgcgctaagcttgccggctacaagtgtctggcacttgggcctgctctggaagagcaccgcttcattcgctcggcatgggtcaacttggagccgggaagcgatgtcgctgcggccgccgccgagcttaacggcctgaaggtgtgttcaagggcggcctctatcgtcacagcctcgtccaattgctgactctgggaccaacagctctccgacacgaacattaccctccaggtcagcgtcaacgatgcgcccgtcgtcggcaagcccaagcttgcgccggaagggtcgaacacgctcgagcgcctgcagaaggaccttgttcaggcccggcgcctaattgttctcctccaggccgagacggacggcacgtcgcggacggccgcagagcacgacggtctcaaggcgatcgacaacaggatggcctctctggccccggcggccggcgccgatgtcgaggattccgcggcgacgctccggcgtaccaaggtccagcttgacctctacctgacgtacctacgccgagtctttcacacctgctactactcgggcagcatcaacgactcgcgcgaggagctcgagtcgcggagcctcaagtacctccgcaaggtgccagtcgccccagctcccgtgccggttgaggctcctgcgaccgaggagcccgacgccgcagcgagcgctgaggtcaagactacacccgaggtcgacgaggctgttccggaggccgatgatgctgccgacgccgacgtcccgatggaggacgaagaaaccgacacgccgcggcgtcgcgacgatgacgagccggcatccgcgcctaaggccaagtcggccgagcagcacaaggccgacaatgcggtggcgtcaaagctctctgaccgtgtgtctcgaccggccactcctccttcgaaacctcgaggctgactttcctttgctcctcgtgccgccgctagtcaactcgctcatctggtcgcagggcgtcgactcgaggatcgagcgcctcctcaaccggtcgacgaccgaccccgttactgtcggcggtaagagcctcgagctgtgagttgtgcttgtctcctcacttttcggcttaatcagcgctgaccatggttgcaatgctggccatgcagggagcaagaccggctcgtcggcggcttcatcaagcacgaggacgaaggcaagttccgctgcaaggagtgcagtaagcttttcaaggcggccgagtttgtcaagaagcacgtccccaacaagcaccccgagctgctcaagccgctcgacacgactcgctttttcaacagctttgtgctcgacccgctgcacgtccagccgccgccgggcgcgccggcctcggtcaacgaccagctgcccgtcatccgcgctccggcgccaccccaaccgccgccgggcttcccaccaggcgcccagttcccggccggctttgttgcgccctggatgaatccgatgctgccgcctccgccgggccagggcatgatgtcgaccggctatacgccaggtttcgtcggctttggcggcctcaacccatacctgccttactcgcccatgcccggcatatcggccatggttggcggcggaggacgcggccggcagggtgccgggcccggtcgcaaccaaggtcggcggtcggaccaggcagccggcgagcggcccccgccggtcgacacgaccatcggtcgaccggctggagttcgcgacgaccctcgtgcgagcaaaggccggatcagctacaacgaccttgacgccaacgtgcccgacggcggcgaggtcaagcttgactactgaggggtgactaggcccgatcctcatgaacctaccttgccccctcggctcatgtctgcgctagggcaaagagctgcctcctgcgctcctgagctcgacagggacgaccagacaatctcatgattgctgctgctgctgctgatggcgtcggcatcgccggcggcgctgcgcgcgtcggatccgcgacttccggccgcacgctgctcctcctcacttgattctcgacgtcgacgtcgcctcggacccctcttctgcctctctttcgctcactcgctcgagaatgctgcggcgacccgcctcgctcgctctgccgctcgagctcaggctgctctcgtcactcaatccgagccgtcggtcgctcggcgcgctctggccaagccctcgtcggccgctcgtcctgcccggcggccagctcccgcttgccagccgacgagtcgtgcctgtcggctctccctctcggcagagagctttccatacgacgtcgcggagggatgtgccggcccctcttgcactcttggccttgctcaaggtgcgtccgagtagcggctgttcgagccggcgcctcgagagctgaccaagggcgacccatcgcttgacctgccggcagtcgtcgaccattttggcgagcgtcacgaccctctcgcgcgtcctcatctcgctcatgccgctcccgttgatggttcatttgctctcgagtaagcggctccggcatcataagaagatctcagaccacatccaggcgtcggacgaggcctggcgcttgcacgaccagggcttcaatccgccgagggacgcgtcggcctcgctcagagccgagctcgaccggattcgcgactgggaggataagcgtgagcggctcctactcaagcagagtcggacggcgagaatcatttggacgctcgtcctccttcctctcgtcgcctttgcggcagccgtcgcggctggattggagcggacgccggtgaccgggcgctggagggtcatcctcctctcgccgcaggaggaggagacgcttcacgaggccctcgcaactggctggttcgagcacgtccttggcctgctcaagccgacgccagagacgccgccgccaaagatcctccctcccgaagactggcgttgggcctgggttgagtcgacgctgcgagcgctcgagcgcggagcgcaggcttgttacatcgccgacgcgcatgctcacagcggcagcccgccaaagccaagcgttccgacggcggaggctcgcttcccaccgccaccgccaccgccctatccgctgcagcctcggccgcgtatgtcgcacgtgttgcaccacgccctccctccgccctcgtcgcacgcggtcgccgctccttcgccggtcgcagagtctcagagcgccctcctcggcccgcccttctcactcctccttctcgacgcacccgacgcgaacgccttcagctacggcttcggcgacggcggcgcagctgggatcgtcgtcaacaccggcatcctcgacgagattctcggcagcactccgccgtcggcaaactctgcgctacccgacgcggtcactgcccctcagcggtcgtggctgtcgtaccttgtccctggtctcggctctggtcggccagcttcgggcgctgcggcctttgtgccaccctcggaggagcaaaccctgcacctggccgtcgtcctcgctcacgaggtcagccatctgctcctgacgcatcacctcgagtcgctctcgcagcggcagatacttctgccgagcgccgtcaacttcagcgtcgacatcgtccggacgatcctctatccgatcaccgccttgctcggtccgatcgtcaacgacgccattggcgcccttagccgaacgggcctgccggagctcagccagctcggttcaaactgttcgaatcagcggctcgagattgaggccgacctggtcgctctccggtatgtaccatttctcgaactgcgtttgacccttcacccgctgacgtcgcaatccaaccctagccttctcgctcacgcccggttcaacccttacgaggcggcccgcttctggttgccggaccatcctccgacgccctcgaccgatcagccatcgacgagctggggctcggcctggcggacgctcagctacggctttggcctgagccatccgtcgaacgaggcccggagcgaggccgtccgccgggagctcgccgattggaagaagacgtgggccaacacgcagcgcagggcggctggcgcagatgcaacttgacccgaccgcctttcgatcgacggcctcatcgccgtctcttctccgggacttcccagtcccacgcggcctcgcgcctcgctctcatatggcgttaaagccgatccgtacacgcccaggcgagcttgggcgggctggtcagcgcacgccgcacagccgccgctaccaccaccaccactcattgtaccctcctgccccgcgtctcgcacacgcgacggctgcagctagcgttccagctagattttgcctttcagacgagccccggccgttcaggcgcatgtagatccgaaggagcccacccctttgatttctctagtgtataagaagccgaccgccgagagactgcgagggtggcgggctcgggtcagtccatcgcgcacgagcaattgacaagaggagaagaaatgacgtaccatggcgtcccgatcggtcgcaagcatccgccgatactcgagcaggagccggaacactagaagggaaagttggtcagcgattggagggccgaaggggggggggacacgcactataagcctgcatgtcgactgaaggtgacgaaagaagcgggtcagcagtgtcgccttgagcggagcgacagcgcaagacagtagaacccaccccaccgccagtgagcatcgacgaagagagccgcggcgtctgcaatctcgcgcgcaaggtcgtcatgcccatcgatgccgtcggaagtgccgaggaagaaggtcgaggcctggtagaggtccgatttgaggtcgacgctgacggggacatagtgcagccagggcttgagccactccgctaccgagtcgtcgaaggcaacagagacgtgcagggtcagcgacttgcaatttcagttggtcctctcggtggatgaggggtgcgacgcacagttccactctgggaagatggtcgtcttgaagacgacgctccccgagccgagcagtcgccgaaagcgcgcgctccaagcgttcccatctatgtcaaagacaaccttgtactgcagcgcgtcgctcgcatcgacccgggccgcgagcgggaggtcggcccgcatggcggcgcaggtgccgtcggagtcttcgcactggttgatctcgcttaaaccgacgtccatctgagaggcgcccagaggggaaagtcagcatcgacgacgaccgtcgctcgacagcggacgaggccgaggacgtacgagatgccgattaagctcgccgagctcgtagcgcttcaagctgagcgccggcccgcccttcttcgagcgcctttcgacgaggacgtctgtcttcccttcgcgcccgtgcgccgtcagcgagtgaagccggatccggtgagagtcgtgccagtcgtagccgtccgtcgcctgacgcgcagagtaggcgtcgccggtcgaggagccgcgccagaagaccttctcccgcaagggaggagaagggcggggcgtcaggaagggtttggagcggataagcggcgagggacggcgagaggacgcaccttgttgaccgtcttctgctcccacggcgtccgatgcgttacgttggcaaagccctcaagcggcgtaccgagcagctggttgccctacaaggccgacccagaacgtcgtcttagcacgcacgctcgctcgtagttggcaagactgtttgcgttcaggtaagggaggaggacgcacctgggcgaattgggagaggacgagctcgggccggagcgtcgggtcacgggcgtagtcaaactacagagagtggaaagtcattcgacgatgctcagccctcggttggggaagacatctgacgacgcgagcaagcgcaacgacgagcaagggccaggaagtacgtaccgaaaaggcgccgtggagcgagaggatagctgggttgcctaacaggtcaaaaagccggacgaagagcagagtcagcactttcccttcacccctcgatcaagacgccgactttgacgagaagatgccaggaaggacggacggcagaaatcgtacgacgtctcgacgtcgcgtaggaacgtgatcggcttcgtccggcctgtcgcgagttgcgcacgagcccgtgcaagaaggggagcgaaaaggaggcgcggtccgtcagcgatccaacagagagaggaagagagagagacagagagagagagagaggggcacgcttcgagtgagtcacgagggaagggggggacggacgtttggtagtcggctcaaggacgacgtcgtggacgttttcgaaagcttcgtcgccaggcgccgacggcggcgctttgcaagcgcttgcggtaccgacctggcgcgtgcggtcttccaaggcggcgagctcggtgtggtcgatgactgtcgagttgtacgcgatggagcgagccagtgaaaagagagggtcagccagcgagcgtgccacgtgcgaggcggagaggaggaagggatggacccttgccggccctcgcgagcccgaccatccgcgcccggaacgcctcgcccatgacattcccccctaagtcatggtccgacccagcgaccctcagcggcccctccgcgccctcaccgaacccctctggcagggcaggccggaagccctcgatcagctgggcgaggagtttgggccggggggcggacgagcggtcgcctgatagtccgacgtgcgccccgcggctgaccgtcattgtgaagccgaaggagttcggctcggtggcgaacagcgcttcgaggcgagcgttgagggtcgaaggtgagaggctgagaaagggcgtgatggaccggtcgatcgcggtgtagtcgtcgatgagcttgacggcatgcgactgacagaaggcgaaccaggcgtcgaagccgagcggcggggaccgggcgtggagggtctggtaggcggtgatggcttgttcactgcggagcagcaaggggaagaagagggacgggggaggtcagcggctggcgagcaggcggtggagcggagaggagagggcagaggggcagagcgacgtgacgtacagcgtcgtgctctgccgagaaagcatcgtctcccattcttcccttgcgtcggccatcagccgccgaatcggatggccctcctcctccgtttcctcctcttctccccccagctcttcctctgagctagctgccgctccggccgcccaccgccggcccgcaggctgtctcgtcacccgccgccgtcgacggacgacgactgacccgtcctccctcccttcgaccgccgctggacgcgcacgcatcccccagtcgtccccgcggccgctggccttcgcccaccaccacgccgcgcggccgtgcgccgagtgactgcgtgcgcgagcagcagctgcagcagcggcagcggcggcagctcggacgtgagcagtgagcagtggccgagcgagcttggcgggtacggctggctcgtttgggctattggcgtggaggagggtgtagagggctagcgagaggagaagggcgaggagaaggaggcggcggggtgggctacgccgggcgaggcggacgagctgaggcgggggttgcattgtgtgccgggtgggatgagggtgagggtcgaggaggagggaagagggcgaggagaggctctcggccgggcctttccttcccttcgccatcgtgctcgaaacaggaggggatgaaaggggtttggcggagtaggcggttgaaggctcgcccgggtcgtcggccaggctgtcatcctcacactcgctcgacagctcgagcgaggcagaagtggttcggtcggccaggccgcatgcgcccgacggcgagtatgagcgagagggtaagggagcgagagagtgagcaagaggagaggagagcgcgtgcgcagcagcccgcccagaaaagcctccgacttaaccctaagtcgccgcgcgagaatgtgaagcgacgccgaccgcggagcgcagtgcctcctctctcctcaaccttcctccctcacacaatccacgatgccgaaagcaacgagcagcaagaagcagcagcagccgcggcatgcgccgttcatcgcccagctcgccgaggaggacctcgtccagaagtttgggcgcgtcagcaagccgggcaagcgcgcgaagaagggcgaggacgacgacgacgaggcggccgagcagacggtgcgcccgacccttccttctctcgtgttggagagcggtcgactgatgagcttctttgttcttcacgtgtaggccgccccggacgctaaagcgagccgcaagattctcgagctcgcccgcgagcagcaggacgaaatggacctgctgctcgaggccgagagcggcatgccggccatggctgacgccgacgaggcgtgcgtccctcccttcccgaacttctcttcttgccgtcgctcggcttggctggccatcgtggcggctgttcctgccgaagggagagagagcgctggtcgtcgaagccgcaagccgagcgacgacaacggccgcgcacaagacccgtctcggctccgaacgccaagctgaccctgttccctccttcgcttgacactcgcagaggaccgagttcgcgccggatgcggtccgagcaggtcgacgaagacggagacgaggtcgccgaggaggactacgggtcggaagaggaggaatatgaggagctcgtgagtccgcctgtctccccccttcctgtctcccacctgcagcgactgaatcaggagcgcttcgactaccgcgggcaggaaattgacccgatggaccaggagacgctcgcgcactacatgccgcacatggccgaccggcccgccggccagacgcttgccgacatcatcctcgctaagctcgaggctggcgccgacgccgacgcggccgaggacgagggtactggcgcgaagggcaaaggcaagggcgtccggttcgagcaggtcggcgacggccgggaccctgcggctggcctcccggcgaaggtcgtcgaggcctacacaaagattggcgagctcctttcgcgctacaagagcgggcccctgccgaaaccgttcaagcttctgccctcgctcccgcaatgggcgcgactcctcgcgctgacgtcgcccgcagactggtcgccccacgcgacgtttgccgcgacaaagatctttgtctcgaacctgaagccgcggcaggcgaccatcttccttcgcgggatcctgctcgagcgcgttcgggacgacatgcgcgagaacggcggaaagctcaactatcagctttacgaggcgctcaagaagagcctctacaagccggccgccttcttcaagggcatccttttcccgctctgcgacgtgtgttctgccacccgccccgtctctcctctgcgcttcccttcaggctgacgcgcgcctccctacttccttgctcagtccggctgcactcttaaagaagccgccatcctttcctcggtcctttccaagtcgtcggtcccgatggtccactctggcgcggcgatcgcccacctagctggaatggactacaccggcccgcactcgctctttatccgcgtgctgctcgacaagaagtatgcgctcccgtacaaggtcgtcgacgcgctcgtcttccactttatccggtgcgtacgctttgctgccctgtccgtcgaccaatccactcttgagctgactcccttcccgtaccccccttctcgccgccaaccccaggctcgcaaatgacaagaagtcaggcctcaaaggcgaaggccacaagctccctgtcctctggcaccagtcgctcctcgtcttcgcccagcgctacgcctcggacctgacgcccgaccagaaagacgccctactcgacgtcatccggctcaggccgcatccgcagatctcgcccgagatccgccgcgagctcgtgggtggcgttgtgaggggcgagccgaggccggaggagatggaggttgacgacgcgtgaggagggaacgggcgagggagagagctgagcgacgcatgtcttttgccagtccccttctccctctctgcttgagtagggtcgcatctcattgcgagcgaagacgcgcgcgatgccagatcgggcgagccaaaccggggagggagaacaacagaggggaagcaagaggggtcggtcgtacaacgagggaggttgcctagctcggaaggggttccaagggggtcctcagagaggggtgggggggaaggaggctcttaagacggccggtagctcgccttttcgaggatgtagccgcgggcgtcaaactggacgggcgtcgtcgacgttggcagtggtggcggctggtcgtaaggcttcgccttgaccgacgcattcgacgacgacctcggcggcggtggcggctggtcccaagtgctgagcgagcccgaggaggagaacggctggctgccggccgaggggagcagggcagccgtcgaaccgaagaaggaggcggtcgagcctgccgtttgcgggtagactgacgtttgctgctggcgggtcgggtaggcgtaaggcgacgaggtggacgctgatgccgatgctgacgagaagtggctgtcgtagactgcctgctggtgcgggtactcgccgccatcgacgccatcatacgcgccctcgtacgggtcggccgccgccgttgcgagcgtcgacgatgacggaaagaaattgctgctgatcccgctcgcagatcggacgaacgggacgccgtaaggctcggccgagcgaggcgggtagccagacggctgctggtgctggccggggccgtaggcgaggctcataccgggcggaaggtcaggcgcgccggcgacgacgcctcctcctgaagacgatgccgccccgtgccgtcggccttggccatacggactttcgccgaagcccgcctcgacagacctagcacccgcacccgcaatcggcgccgccctagccctcaacgcctggccgtcgtgctcgtcgaaatcgtcgagcgcaatctcgggcagcgtcggccgctggtggacgacgccctttgagtctttgccgccttgcgcagcaagccgcttttcaaaggcggcgttgcgcgcgacgcgctggttccggcggcggaccatgagctcggccacgcgctgacgggggttagcgacgtcagtttgagttcgacaggcgttgggtgacgcgccgagcctcaccttgtcgaccttgtggcagcaatactcctgcgacggaaaatagggcgtacgtatcagtcagctgccgactcgatggatagaggcaccggcgacagaccttcaagttgcccttgatgtggcagagcagcgggaggtagaggacggcagcgacgacgaggaggacaaagttgacgacaaagacgacgatcgtgaagatcatggcgagcagaaggaggagagtgacgatgttgccgccgtaataggcggtcagatcggttgtttgccatcggaaaacggtgccaaaagagtagctggcaccgggcgggcgggtcaggtcggtcagcctgcctgctgtgacactccgagcaaggggtgggacagacaggatgaggccgttgataacctgccgaggggcgtcggcgatcatgacctccttccagcctgcagagcgacgggcgtcagcgtgagtgcgagaggagcgcaggcgtttcggccgacatacgcactcttcatggtgaagaagatgaagaaggcgaggtcgtcggcccgcttggtcgaggcgctgatctcgccaaagaagcagaagtgtgcgtacgagcctggtgaaagtggcgcctgcgtcagtgaagtcgggcagggcgaggaggaggcttgccttagcgggacgcacgtatgctgtaccacttgtgcgcgtagaggttggtgaagccgtacgagatgtctcgcgaacggacaacccgacggcacttccacgactcgtagaagagctggcggccgcagacgatggaggcagggcatcagcgacaggcggcaagcgagacgacgcaagggggtacgcacgagcaagaagctgaagatgatgcagccgacaaagatccacttgcagagcgggaagctgatgttgattgcacaattgtgcgtctctctgcacttcgactggatcgtgttgatgtagccctgtttggcggagacaacgggtgacgatccggtcggtcagaggtcgggcacagccggcggcggtggaagcggaccagcgcacctttgcgaggagatacgtcacggccgagtagatgttggcagcgtggactccgacgtcgatcaggacgataatccatagccagacatatttggcccgcgtgccaaaggcgttcgtccggtactcctcgacctaatggagccgacgagaagagccacggtcaaaggcgcgtcagaacaagctgagactccgcttgatccggcggcctgcagaaggccaaactgacgttgataaagtcaaactggcaagagcgaggtggggagacggaaagggagggcatcagccggtgctgctccttcggagggctgagtcgggagccgcctgcgcgtagggcctcaacgcgcgggacaaggacgcaccttgtggtccaggacgacctcacgcttccactttgccgagcagcccatcgcttttggggttggccccgtcgagaggctgcgggatgggtcgactgggagggaccttgaggtgaaggaaggagggtcggtgcagggaaggcgctcggccgagctgcagagaaggtcgtccggcgacggtcttgtcgaagcgcgtcaaaggaatgtcgtgcgtcggcttctaacaagaggtggatctgcgtgtgtgtctccgatcgggccggcgaaagagaagatggaggaaaggcgaggtgaaggaggaggacgttcgaggtcagggaggagggccctctgctgctgctgctgctactgctgctgcggggacaaatgaccgcgctgaatcggcagatgcaagatcaggcgcgcgcagcgggaagggccgcaggcttcccatcaagccctcctgctccaacaccaccagggagcctgataccagggctgacagcgggctaaggtatctggctgacacatgattgtgccctttttgtgggcggatgcgggtgaagggctagcaaggagcgactctggcagagctcttgagcggccgccgattactctcgacgcgtcgcgtccaccgactccgactccacttcgccaccttcagctcgaccgtccgccactttccacagcagtgtccgtctagtctcgcacgatgtctgaccggccatcgaccactactggtccgcccaagcgccggcccttctcaccagtccatgccggttgcaaggccggtggcccgagcagctcgagctcgaggccaccgcagcaggccgaccggccgtcgcacggacctgccctcgccggcgtggctcccgccgctgcgacgcccatcgccaggtccaagagcgtcctcggcggcgccggccggtcggtctcaggctcagggacgcctctcctgacggcgaccggcgtccactcggctcggcgcgtcttctacggcaacaaccagcagtttgacggctctggctcgcccggactcggcggagggagtggcgagccagtgacgtactggtgcgtctcgagttggccatcatgcgcgcctgaagctgacgttcctgctgccatggcctctgatcgcgcgtgtgcagggcggtccagtggcggaagccgcagttcaagaaggcaagcctcccgccactctaatcagccctgcgcggcgactctcgactaacccttcttccgctcgctccgatgtcagcacaaagtcaggatgctcagtgtgatggatttccgggaagaacgcggagctgacaccaggctcatgcgcaccttcgccagacgtgggatggcgacggcatccttatcgtccggaacggcaaggcctcactcaaggatgagaacggcaaggagtgcgtcgcgcttggcttgctcgctcgctcgctcgtagcgacagctggacgggctgacacgctctcgtgatgatactcatccttctcgtagcatcggcacctccaaggtgacggccgacattgcgagcggggacgagctccgcgttggcggcaaagaggtcgagattgacgtcgccatcccggctcaggagtgcgtccggctgaacgactgcagaaaagagtgttttgcgctgactctcgcgtcgtcctgcgcggcctctttagctacgtctctggtacggctttcgtgacgagcgcactagcgtgcgccggagctgccgatccccctctctgaccgccctcttccttttcgtaggcaactgctttgcaactcgcatggccgccccgcttggcgcaatctcggcccagaaccggattcaggcgaccgagcgcgtgccgctgcctgcaggcggctggcagccccccaccgtcctcaagacgccgttcaagccgccgctgccgatgcagactcaccgaagcaagccgatgtacgccccgccgacgctcgtgacgcagccgcgggcccgaccgccgccgccagcagcgccagtctacgtcaagcccgagcctggggcgtctgacgtcgagatgctcggacccgacgacggccggcgctcggagcccgaggctgggttgtcaaagcggcgccgcatcgctgccaatccggaaaccgacgacgacgacggcgagcggataccgactgcagaggaggctatccgcgcgcgtgtcgaccaccttgcgatgaagccacccgcggccgccccagcacgtgctcctgccaaaccgagcacctttgccaagccgcggtacgtccaccggctccttcaggtgacgtgcagagctttcgcacagctgacgacggtgtacatccgctagctttgatccggacaggcctggggccatcgtcatgaagcgaccccaccgcgcgcacaggaccgagttcaacaagcagtgcgccgcgccttttctcgatcaggccgcgacggcgcgctgatgagcctgcctcacttgaacaggaactttgagattgtcgacgtcgtcctcgatccgaggctctcggacaagatgcgagcgcatcagaaggaaggcgtccaggtacaacctctgagcaaggcctttacggcgacccccagctgacatgtcgcacgccggttgcagttcatgtacacgcgcgtcatgggcctgggcgcggtcggcggccatggagcgatcctcgcagacgagatgtgcgtgtcggctgccggcctgctctctgccgttcgaacgttctctgaccagctttgacccgcccccgctctctaggggcctcggcaagacgcttcagagcatcgctctcgtgtggacgctgctgaagcagaatccctatgcggatccccgcaaccccggcgtgtgcgtctccaacctctcgacaaacgcgtctcgcgctgacctagatatcgtggcgaccccttacagcgtcggcaaggtcctcatagtctgcccggtgacgctcgtcaccaactggagcaaagaatttcgcaagtggctcggccgggacgcgctcggcgtcttcatcggcgacggcgacaagacacagatccggcagtttgctaactcgcgccgacaccaggtcctggtcatcggctacgagaaggtgcggttgcttcttcgcgagctttcgagatcgcgccgactgatgggttttctgccactgcagctccggactgtcatcgacgacctccgcttctgccagccgccgatcgggctcatcatctgcgacgaaggtccgtatgagacgctccttgctctgcgcggaccagcctacagctgacgggccaactgcacttcaaccaggccaccggctcaagagcaaagacgccaagacgtccaagatgtttgacaaactgagcgccgcacgtcgtgggtcttcccttaccgtctttccttccgtcatgcgcatccttgctgacccggaccgttgctcacaggcatcatcctctcgggcacgccgctccagaacgacctcggcgagttctggtcaatggtgcggaccctctcaccactcactcgggaggggcagaggctgaacctccttgtcccgtctcacaggtcgactttgtcaacccaggcctcctcggcacctactcggatttcgcgcagatctacgagaagccaatcgttcgtttccttccccttctccccatcgacaagtccagcgacagtcttgctgagtcttctggaacacactgctgcagatgaagggtcgggcgccgggctgcaacaagaccgaccaggagctcggcaacgcgcggagcgccaacctgagcaaatgcagtaaaggcatcatcctccgccgagacgccagcgtcatctccaagttcctccctccgaagcgtccgtccttttgcgactcatcggctgacccctttctgcgatgcaaggctgactggcgctgcttttgaatgtccgccctccaggcgagtatgtcatctttgtcgccccgacggccctccaacttcagatcttccgcgagctcctcaagcccgagacggtccaagcggtcgtgcgcagcagtgggccaggcaccgggccgtcaagcgggtctgtttcctcccttaaccgttgccggctcagttggttgcagaggctgacctttccccccgtctcctgggccggtttccacagcccccagcccctggctctcatcatgtacgcgcgccagatctgcaacagcccaatggtgcgtctctcgcccctccgaaacgagagggcgtggccgacccgtctcgttcacccccgcccttaagctcttcaaaaaggacgaggagcaggtcatcgacacggcgacgcacgcgatcaagaaggcccgggccctgatcccagacgaccggtcggtcaacgacatcgactgcagcggcaagctcatcgccctcgccgacatcctcagccagatcagagcgtccacggacgagaaggtcgttgtcgtctccaactttacaaaggtctgcctccaaatcgcatgtccgcaacagcaaacggtgacggaggctgatcatctcactcatcaattcaggcgctcgacgtgatcgaggcgctctgccgcctgcgcaagtacaagtttgagcggctcgatgggtgagtcccggcccctttcaacaggcccgcagaccgccggctctgctgataaccttgctggctttacgcagatcaaccgcgcagaccaagcggcaggacatggtcgaccgcttcaaccgcgcgacgcaagcgcagtcgttcatcttcctcctgagctccaaaagcggcggcgccggcctcaacctgatcggcgcttcgcggctcatcatgctcgactgcgactggtagatctcccagtcacctgacgcacagtgctttccgcttggatctgactatgctgccctcatcctgcaggaatccgtcaaccgaccagcaggctatggtgcggcttgctgtccgatccttgaggctgatgttgcgcgtctcctgacatcatcgcgacggtttttctccaggcccgcatccaccgcgacggccagaagcggcccgtcttcatctaccgcctgctcagtcagtccatgtcgccggcgtgatcggaccggctggccgctaatccgatccttggacctcgctacagcaactggaacgatcgacgagaagatctatcagcgtcaggtcaccaagctcggcctgtctaattccgtcatggtgcgtccagctttggaaagtggctgctggcatttcaaagcaagggctgaacactctgacctctctcctccgacctcagaaccacaaagacgacgcggccgacactggaggcggctccgccgatgccttcaccaaggacgagctccggcggctgttccagatcgagagcaagacggcctgcgcgacacacgacgtgagtgagccgcactcgccgtctggctgtgcctgcttctgtgggactgaccctgcactcgcttctcttcaatgccagctgctcggctgcgactgtcagttcgaaatgctcgaggacgacgagccggcggccccgctaaaggccgaccgccacttggccgaggcgtctcaggagtcatcggacgaggagcaggcatacatcggccacccaaccaagcggccaccgccccgcaaaaagtcggaggcccgaaaggtaagtcttttcttccttctagaggggcgctctcctctgacgtcgcccgccgttcgtgactaggcgcgcgagaaggaggacaagctcgccgtcctcaaagagtggtcgcacatccagtgcgtcggcgtcccgccgccggcaaagatccaggacgccgtgctcctcgcgctcgtccgcgacgctgcgcgcaagcacgacggcgccgacgtcgatgaggagagcgaggcccggatgagcgactcggagggcgtctcagaggccgatgagcgtggcgtgttgcccggccgccccccgcctgcaaccatcgagcgcgagctctcatggtcaccttcgcccccgccagaggctcaccggctggtcgacccgttcgccaacgtcgtcgacgacggctactcgacgacgagctcgcctggcgcggggccggccgagatcttcgaggacgacctcgtgacgagccccgagtttgcgctcgcccagctcgcgccggccagcggcaagggcaagcagcctgagaggctcttcatggacgacggcgggagctccgaggacgcgcagtcggacgccatcgatgtcgctcggccggctcgcgctgcccggcctcggagtgagcgcagcaaggcgaccactggcggcggcgccaagtggcagtccatcgtcgacacgtaccggatggccaacgacggggaaggcggccggctgacgttcatctttgaacgcgtctcgctcggggccgatgaggctgcgccggggcagcccccgccttgacgaacccccttcgcatctcacgaccgccctgcacgacgacttattcgacgactcccctcctattgcacgacttttcgcgcgagatcggcaggacacgaggaaagaggcatgtggataagctctagggggtgagagaaggcgggcgagcgttcactgcggaatcgtcaccttccaggctgagggcggcagggctagcggacgcgaggcggaaagaaagtcagcctggaaccagacgcacgagcgggcccggcgaacctaggaggcgggaagacgcaccctggagcttgcgcaccgtcggccggatgtaaccgacaagcaggagcgcgccggtcaagacgcaaaggagcgagacgacatagtagccgtctcggccgacgacacactcgccgccgagatcggcgcactggcgccggccgtgatccgagctgcattcggccgagcggacgacgaggtcgagcgcgtcgtgcttgacttggcaggtcgcttcggtgaagtagtcgacgcctttgaggacgagcggcttcggccaggtcccgccgaggttgctgaccgtgttgagcagctagcggcggagggtggaatgggggccccccctttcgcttcagatgacgcccgagagctccaccacctccgcaacgtcccccaatagcactctcagaatgtccgcggcatctttccgatcctccgcaacgtcctcgctcacctcgaccagcggttcgtctagtagggtctcggccggctctcgcgatggtccgcttcaggaacagatccttcaagatccagcagggggcgtacctggtgcgtttaatgtcggccgagcgcaggcgtcagcgttagatgcgttctgacactcttcgtcaaacagcacttgaagagcttccagcaatggccttgctactggcagttgtgcacaacgggctgcacgatgcgcaactgccgcttcgaccacagctgccgtgttcgtgcctttcctctacttttcggcccttgttctgacgcccgatccccgtgtgccttgcttcagcttgcctatcattgaccgaggtcgtggcgctccgatggatctttaaaaacgccgtgcgtctcctcgtccccctcctttgcatccatttccagagctgaccgcgcgctcgctctgccagggcagtccgtcagagaaggctggaatgtcgtatatttctcggacaacgatcctggcgcggagcgggtcgccattgcattctagcgtcggttgggtgcctgagtgccgtgtttttgcggaggcggcgcgctgaagcggcccgacttctctcaatcgtcaacgacgcagcacccttgtagatatctactgattcgcaagagacgccgctctgcttcttctcttcacgttgacctttgcctgtctctgacgacgacgcgtcgctaaattggtctcgggccggcggtctcgcgcagcaggcactaaagcaagcccgtcccgtcgcgcctcctctcggcctcgcctttctcttgtctagccaacatctcctcacgacaccttgccctctccatcctcctcttattgcgccacctttccgatgactcggcacttctccttggagcagcagctcgacgagctccggtgcgggcctctcttgcgctcggcctgtcgcttagcctcgcctcgacctatcgacgcgtacgccgagtcaacagaagctgacgccagtagacctctttaccttctcgcagccatgaggtcaatcagctcaggctcgccaacatcgatcggctcacgtctgcccgcctctggatgacgcgcttcgacagcagggaacgctcccggctgccgctcgagcgtcgggtcgactcgtgtgtcccggctcgggagctcggctacctcatatggcatcggctcaaatttgctcgaccgccctttgctgactcgcccaactggctgcttcctgttgtccaggctcaagtcggagcttgaggcagtcaaggccgagcgcgacctctttgcctctcagttgaaacacgtccgacaggccatcggcccagccgccggctccaatgtcaagcatgaagggctcgtagagcaggtgcgtctgcctcccttctcatgctcagctcaaatgcgagtactgacccgtcgctcgctacagactccagctccctcaaattcacccccttctgaggatgctcgtcctgtcaatgttcgcatctagctgcttcgtcatttgcgtctcgtcgactgaaattttctcctcatctttgtccttcgagaagccctccgaccagccgatgacggaaccctcgcccccctcggaggtcaagaacagctttgcgcgcgagtccttactatcgccaaccgccatctccgtcgcccgaatgccggatcttccgcttgtcaaaaattatcctctcacagacggcccggagcctctgctttcggtcttcggtccaagctctccttttctttcgtcctcggccgcgccgagttctgcccaggccatctcgcgctctgctcgcccggtcgatccccgtcggcggccctctgacgccctcagcaaagctccagattcggccggccgctcgtcgccagccaagacctcctcctctcctcctacctccgccgctcccgctccccaccaactacgcagccccgtctcgtcagctcagccgggcgaagacgcgacggcaggtaccccggcgacaatcagcaccggccgcgagctcctcagtcggctcgagacgccggccgggcagtcgcccctgccgacgcttacttcacgcgtcttcaagcccaagtcactcgaagaagaccaggcttaccaggtacgtccttcttgtcaagctctcagtctgctcgcagacaacccattctgccggacctttcccttgtagctcttcctctcgcacgtccggcggccttgctggaacgtgtacgggctgggcaaactccgctgcctcgacgccggctgcacgcatttccacttcggccgtgagtgcccttactcctggaagccagtctagctgccgctctgatactcccctcctttctacttgagcgcctctcacttcggctcagcacacggctctcaccttcctctatggcgtcccggttcgtcgacagttgctcagaggattttcctgtgcttgacgctgacgcgctgtacttcctctgactgtacaggaaagtgacggagcatccagcaccatctctgcctcgactctgcctctgactcaagcgagcgcggtcccgctcgaccaacccgttgcgccacgaccgacggcgacgccgacggcccgatcggtgtccgactcagcggccctcgacatgcgcgccgcagaccgccggtcggccgccctcattcacaaccgcgcaccctcgaccgcgagcaatgccctcctcagttcgatgaagcggtcggcgagcatgagcgcggccatcaagccgggcgaagccgaggccaagcggcgcaaggtctgagctgccgagcttgcgcgcgagagagcacatatatcgcccatgttccttcctttctcaaacgcacccttgcgcacctcagcgcaactctgcgagtcctttctcgccgtcatctctcctcggcgcatgtggagcaagcctctcgtacatatgagctcggcctctgttgcaagccccttcacatgcgcagcagcctaagccggggccgacccgctgcagcaggcttcgccttgtcccggtcgccttggcttccattcaatgaccagcatcgactcactacacgacgcctacccgtctcctcctcatcaccctcccagagcctctcccatgatcgccgacgacgagcaccactacgtgtggcgtcctgcaagagcttctgcagaggcttgcgccgccggagaacaaaaggaggctcgagcagcatcccgacgctgatggcgaccgaccgtgcctttcctcctcctctccctttcatcccgaccgctacgctcagctttgagctcgacgggctcaagctcgtcaaccaggaccccgattctgccgttgcccaatggaagcagtgctactcagcaggcgagcggctccgcgtgccgagcgagcggcggatcgcccagtgcgttgtctatcattccagcccgggctgagcaactcgccctcgtcattccgagctgacctgatactcgtcacctctcacaacaggctcgaggccgagcttgagacggtgaaggctgagcgggcagatctccaggcgcggatcaacacggtcgcagcgggcggtgagcatgctgatgagctcggcactcgagtcggcctcccggatggtgcgtcaagccgatttctcgaccaagtacgactgaacgctctcgctggcacgatcatacgctaagtcaaacgcagatccagattcagggagctccctcaccgcctgcgtcaggctacggggaaggtggcgacgcggtacgtcctgttgctcagaccttgatcaaagggaccgagcacagacgctttgcttgctcacccacttccgcctaaaggacatgtcggcaccagaaagcccggtgctgtcggtcctcgcccgaactcgcagcctccctgcgctccggcttgacgacttggagaccagccgcgagtcggctgtgcccgctgaagcccccggcaaccccatgctcccaatagccacgaccgagtcgttgcgcagggcagacatcaaactcgagccgaccgtcgacgctattccccaaagaaatcagtcagcaaggacgtcgccaagggccgcccgacgtcgaacccaccggcgtcaaccagacgtccaagtggcccgcgccggaacccctcggccgagtcgcacgccgttccgtaggccacggttgccagcttaagcacttctcgcccttcgccacccgttcgcgctgcttcgctgtcctcgctcgacgtttcctcgcaggccgggcctagcgcaccgcgcgaggtccttttcgcgctcgagcagcccgtcaggcgactgccgcacccgacacgcgctccccgcgagtttggttttcaagctgcctcgaggaggagcaggctttcatcgtgcgttctacaaccctttacgcttgcacgcgagcgccgctgaccgacctaaattcgtgcgcaacagtacttcatagccttcaacgtctggccctgttggcatgtcctcggcaaggggacgcagtgccaatcccaaaaaagggctcccgccacaatgctggacgtgagtttgcttgcggtcagccttcaggaatcgcggcaggtggtcaagtgcaactgacgcttccgaggatcctgcctctgcaggcctgaccccggtcgcgttcaaagccttgaccgttcgcgacttcaacgtgcggccaggtcggcttcgcgcgattaggctcgccccgctgcagctttgacgcccgtcgacccctcttcacaggtccaggacccgaaccgtcctccgtcgaagatgtagcgcaaagacggagcttcgccatcattcctgccgtccgaccccctgcgcgcctggtgggagccatgggagggctcggcggagggctcgaagcgccagcggacggagtcggctgaggcagcgtcaagtgcgcaagcgatgggcgatctccgatgagtctgcgtgggcgaggacgtgttaggtcgaccgactgtcagtcgcagcgctcagcaggagatcccagacaccgcagtggcagttcgtcagcgattcgtcagccagcgacagacggcggcccatcgaccggatgcgaccggcatcgcccgcaacctgcccgctctgggagggctcgtctggccgaccactcgtagtgctggagactgagctgctgggcagcgccaaccggagggcagcttgccggtgccagcttgtcgcccgcaggcgagccgcgaccgcgctcatcctccccgctgtaggtcgaccggtctcagtggacggtcctgcggcggaggaaggtcgtgggctatgatgagatggcaggcgagcagtttgattgagctgaaagggctgctaaaccgggtcgacgtcgggaggcacgctcgggcaagggcgagcaagctgaggtcgccttgctggcgcactcgctgtcgttacaccgcgatgcaagaatccatcacttccgcctcatcgagtcgctgctcgagctgtcctggtagaccagagcagatgcggctgacatggtgtagctgcagctgctgtcgaggtcgaaccggccaactgtggtcccagagcgacctggacgagctgctcagccggacgaaggccgcccttcactgacgcgctcgaacactcctgtcggacgtctccgccggtcgcccgcctacatgcgccgctgcgggatctctgcgacagctcggaaacgcaggcaaaccggactagcttgaccatagcaatggtccccgaccagcctgactcgccgaggccggttgaagccaggcatggatttcgccgagctacgcgcccgaccttcttcccggcccctttcatggcgtcgctcgcccccctttgctgactcacgagcgagcgcctcctgaacgcgagaaaggctgaagcagcgggccagtccttcccctcgcccagcaaccacgatgatccgaccgacccaagctgccgacgcccgccctccagctcttcctcgccctcggtctctgcctcgcaccagcgccctgtcgtccgtccagccgatgtcctctcccgaaagccaggtcgaccagcttaggtgcgagcttccgttccggccggcgctctgcccgaaatcgagccgattggactgactgagcctccttctccctccggctcagatcccgcaccggcctgctcgatccccagatcgacgacttaagcagcgacgtccagcgctggcgccagcggcatgcccaagaggtcaagcgccggctaccgctcgaacgcgaggtcaaggcgtgcggcccgagctcctcggcctgttgactgagctcggcactgacgtcgtcctgccaccgtcgacaggcccaagaaggccatccgtcggttcaacaccgagctcatcctcgcccggaagaagctcgagcggcggcagacagggtcagcccgactgcagctgtctcctgtcgagctgctggtctgattcctcgatttgcgtctcgctcgttgcagccgacggacgacctcaccgccatgcagcagtcgaaagtcgcgacggaaaggtctcttcaggctgatggggacgatcgtcgaggcggcagaggacgagacggagacggaggtgccaacagctctgatcgtgcgtcgagcccttaagctcagcttcgagtccgccgctgaccgactccttccctcaatctgcacagacgccgcctgccgagcctgccgaccacacgatggcaacacttatcgactcttgcggcaatccgccggacctgattgtctctgctagagcggccgtctgtcctttggtctcgcccccggccggcaaaggcccgacagcagaggagacggcgacggcacttatcatccagagctttgctcaaggaagagtcaaactgcacccgtcggtgccacctccggtcggtcgtccgcccattccgctcgtcgccgcatcggcagctcttgaagcggcggtactcgcagagcccagcataccgccgccgcttttatgcgccgcttccaccgtcaacgtggcgcgcctgctggagttcgtgcagcccctgctggcggtgacggccgcccagcaaaccttagtcgctagtcatgagatcgcacaggaggagtacgaggtcagtcgcggaccctctctttgcttccttgagctagaaggctgacccgtctcggctcatcccaggccctgaaaggcgttgacgtcctgccgtgtgcgctgcatttcctcacgatcgacggatgcccgtttggaagcgcttgccctctgccgcacgcctgtgcggacggacggcgtacgtccccttttcagaggcgagttatcaacgtctgactgctgaccattgtatttgtttgccgcagtatcgctcacgctcgagcagcggatggcgctactcttccggctctcggaccaggtgcgagcgcagctttgcgaagcactcacttcttgcgctgccgagccgacactcctctttcctccactccttgcgcagctgccggacatcgtggccgtgctcaaccctacgacccggtcgccaattaacacgccgagcccgaatcgctcgccctcggtggcaccgcccagcacggaggaagtcatcggctcctccgcctctgcgcccttcatcgccgtcacgtcttctccaagctcggacccaagtggcccgcctgcgtcaccgcccgctcgtccaagggcgccgtccctcgaggccagggtccgaccgccgagtgtctcgttgccgtcgctcgccgccatgctcgcgggctcgaccgaccagatcagcttcacgatcccggccagcccggccgccccgattcgctaccgttcgacgccgccaccccgtcttagcgtcgggccgtccactgaacacccccgtcgacgctcgcgccgctcaaagccaacccctccgcctgccgcgatcaacacgtcttgcccgccgcgcctctcgcagcggcaaccacacacctttccggccgcccctggcttccactccgcctcgaacccggccttcgggtatccaacggtttatccgcctgctcagctgcactaccacccgtacgcatacccgacggccgatgaactctcaacgatgccggcgccggcttacgaggcgatgtaccggccacagcaaatgttttcggtctactctggcccagcagcgccgccgccgcccggcatggtctggcagacctggcaaccaggcacgcacggctttctcttacctatgccgccatcacggccaccttcggcgcacgctggccggccacggcgcgtcagctggtcggacgagtacgcagctgcagaggctaggccgtcttcgtcgtcagtcgaggcgtctgcgccggcagtcatcagcggccagacagcgcagacctcgagcacgaactttgtcgccggctgagagcaggccacaagtgaatgcttctcatgatccctcctccttacctccgacgagtgcagccagcaagtgcctttgagcggcgtttcgtggggctccatccctcggtcgacgggccgagaaggcccgcgtccaagatgcccgtcagctgcctccttccgtcttccaccaccaccacctcgccctcagcccacctgcacccttaccgaacagccagctagcatctgtaaatggtccgttccatccagccgcctttagagcgcgttcgggctcccgtggcccgataaagacctcagccggctgaccttgcctcgtgccttctgctgctcgtccgtccggccgtcgccgctcgttagtcgcaccacccctcctcgacgctctcggccgcgtgcttcgccggcggcatctacggtgcgctcacctcgctcgcacagctctcgcacgcagccgcaaccggtagactgaccagagtgctccgggccaactaggcttcagccggacgcggtcgatgccgagcctcattggcggctttgcccttggctcgctctttgccatctcgagcatccgcatccgcgacgggctcgactatgcctacgaggccgctggtcagtgccccttcacgctgcccatgacgtctagctgcgttgtcgaagcttataggccagctggcgagctctagagctgacgagatgaccgaccctctgtgtcgcgcgtacgtcctggcctgttcccttcccttcagctgcctcgtcgctccttctcctcctcgccggcgcgcctcggttcagcaaaggcaaggccccaaagatcctcagtgcgtccttctcgccctacaagggattgtagctggcagagctgctgtcaaaaaaatcgggcagcagcggcgctgcccctttcagctggcgacgctccgcctgaacgctcggctgaccctgtctgccaccctcctctccagccggtctcggtgcggccggcacggcctactatggcaagcaggtttacgacttccggcgctaggcgccccgtctctcttgcatgcgccgcccctccgccgtcatcttcgcgcaccttctagccctgccctgtttcgaagcgggccaaacgcgaggttcttcttccgtcgtgtccgctgcgggctcgacgtaacttcatccttgactccccccgccttccatctgcacttgtaccaccatccttgccctttcctccgcatgaccgtctcaccactctcttctgattgacccttgtatatcgacgaacgaccgctttgaggtcgctcctctcgatccgcccttcttcttcgggctgtgccgacgcagaatggggcatcatcccgcagactaagcgcagaaagcagccggtccgagcgcagctgaccgaggtggctcgcaaggccacacaccgtggcctcctacgagcgcctccggacgaattgagttcgtcgctccgtctcgcatccgcctgcacaacccttcaatcacccacgctcgacggatgcctcgacaccgccgtcgaccctgcgcccgacgccggacccgacgccgtcgacgagccctctgcctgcgggcgatgcgacgcgggtgcagctcggaagcgggcgtatgcgctttttgtgcgagcgatcgtcgtctcttcgatcgattcgggcaggtcggcgatccagcggccttggggtgggcacgagggtcagttgcgggcagggtgggggtccaaagggggacggaccgggtgcgccggcgacgtgcgagaagggcgcaaggacagcatagtcggggacaattgtgccgtcggcgatgatgacgcagtctttgatcattgcgaatttgccctacgagaggagaaggtgaccgggaggagagtcaggaaggaacgagtgcgtacagcgcactcgatggcgcgtaggccgcccaggccagccctcccgctcgcaaagcagaacgaacaatgacacagtcgtcgccgatggtgacgcagttgccgatctgagcggcctcgacgaccgagcgcgcgcctatcgagacgtggtcgccaatcttgaccgggtagtagttaaagacgctgtcaacgagggacatgccagccatctagcttgtcagggtgattagtatgagggcggggagagcgtgaggagactcacccgcgatacgtcttgcccggcggacggacgacgctccctggcccgagcgtgcagtaccgcccgaggctgatgacgaccccgcccgccttgctcgcgctgccgcctgcgcccgcagccgaggaggaggaaggcagccggcgcaggtcgcctcggagaatcgcgccggggaggatgcgcgacttgccagcgaggacgatcgattgcgggccttggatcgtcgctgagggttgacgccgggggggggggggcagtcagcctcggttgtcgagctcggctgggcgggtcagttgaggggtcactgacctcgtcgcgagacctgagggtcaacatgaagcagcagatggatgcgtcgttcaggcgagcgagcaagcaggacgagggtgagggtggtggaggcgtcagctgcgcgccttgagctcgagtgcctagcgctgggctgccggcttgcctctcgtcaggcccgcaccttgttgcctgtgtcctggcgtccgagacgagttgaagaaaggtttcagtaatactccacggaggcagctcgggtcgagtgacgactgtgggacgaaccgtctcaatgtactcgttctgcatcgcgcgccggcgagtcagagggacgagagcgaagcgttaggcgacaggcgtctccaggacctcaggaccaggcacaccttggggtacagaacgtcgggctggaaggccatcgccctcgataccggccggggagagctgcgatcaatgaagagcaggaaaggcgcctggcagtcgggaggcagcagctcgcggcgtgcgaaggcgaagcaggagacgcgccggcgggcgacgcgcagcagcagcgacgacggctggtgcgaccgcctcaagctgagcagctgcttgacgacaaaatcagagatggctaagaaaggcagccgtgtaagcaaccccctgcagtgaagctcgcgaatgtcgcaagattgcagctggataggccttccggtggccagcgcggcgtcggcatgctcccaggcatgacaggcgaccgccgctgattcacctctctgctgagcgagcactaaattctcagctcgagtactcctgctgacgagctctggtgtcgtacgtcgacaaaagaggacgtccgcagacctgctcaggatgcccgagccgctaagcgagtgtcgacgtggcagcttctgccggcttgcgtgtcagctgagttactcgcgctcgcgtgactgaccgtaactgccctgcccttctcgtcgcttcgcccgccgctcgccctcggcccgcccctttgacacccatattctccttacagactactcgaccacggatggacgcctttttgtccgactttctcgacatcccgccagagacgccgacctcggcccggccgtttgactttgacggcagctggccgcaagcatcgacggctgaccgagtcggcgcggtcggctgggagctcgccgctggtgccgtcgacaacgacgacgacgcctttggcttcgccagcagcggcagccaagacgacaccgacgtctggctcgcccactcgaccggcgacggcctgagctcgtgcgggatcgagctcggcgagattggtgcgttcccttccacctctttctcgtccggttggcctcgttggtcccggcctcttttagggttctgctccggacggtccggctaggcgggcgagtgggtctgccttgctagcccactcctctcgccagtcgtcaagcaggcagagcattgaggtcgggaggcttcggtgctacggcccacgaccgcctcaagcttgaaggaagtgccgtgctgaccgagcgcttcgcactccctatgactgtccggccctctagctccactgcccggctttacgccccctcctcaaccaatctcctcgtcggcgaacttcccgtatgcctctcaaggcaacgccgcctcaaagccctatgcgcccacgccggccgattttctcacgcacaacagcagcccgtacggctcgtcgacaggcttcgccccgcccccacctccggcgtcgacctcgtcgaggtcattcgactcgccctcgccttcctcggcctcgtcggcctccttgccgcctgccacgcccccttcaggctggaccgccggatcggccctaacgtccgcgactcttgccgacgacggtaccgggccggcactgaagcgtgcccggagcgaggactcggacgcgagcaccgtcaatggcggcggcagcgtcgacccgtacgcgctcttccttacgcccggcgctggcgccgtcgctgctgagggctgggcatctcctccatccgcgcctgcttcgacctcctcggcctcgtttgcgacgaccgcagcggccaagccgccggccgcgaagaaggagttgacgggcaccggcaagaagcgcaagtcgctcccgacggtcgccgagttccagcagccgtcgaccgacggcctgagcaagaaggaggcccggctcgtcaagaaccgggcggcggcgtttctcagccggcaacgcaagcgcgagatgtatgacgagctcgagattgaggtcggcaagctccggaccgaactcgctcagctgaaggacaacgcaccgccgccagcagtctcgtcaacgccgatggtcgagctcgctgccgtcaaggcggaccttgcgcacgtccgctcgcttcttcacgcaagcacggcgcgcgaacgcgcgctcgaggtcgagctcgcgagtcttcgcgctcggcacgggccgtcggcggcgagcagcgcaggcgccgttctcccgttagcccatgctgctattcagccgctgcaccagcaggtcggacctgggccaatggtctctggcttcggcgccgacgacgcggccgcccacggccggatgcagccggcgcacaccgccggccggaggacggttggcgctggcgctgatcgcgacagcaagcgcatcggaggtgtcgcgctcatggtcagtctgccgcgcccttacctcttcttgcggcgcctgctgacacttcctcctcttacccgcaggtcatcatgttcagctttgcccttttctccttcccttcgaccgcgctctcttcgctcccgctccgcctgacgcccacgcacggcgccggtggctcgagctcgcctttccccgccttcctcggccgcgtcctctcggcctcgaccggcgccgccggcggcgctccgcgcttcgcaaacgtcacaatcgccaaggacacgggcggcgggccaatctgcctcgcgcgcgacaagtcgaagctcaaggcctcagaggctgagttgcagccgccggcgaacgcgaccgagccagctgccaacgagcagatggagtgcgacgcgtcgagctcagcgccggcttcgccttctgcggcgtcggacggcactgccggagctcgcgacctcgcatggccgctgcctcacgtcaacgaccagcaggcgacggctcggcggtcgctctcgctcacgctgctccggccggttccggcttcggtcgctgagctcgccgaccgcgacgagactgggcgagacgatgacgtcgacgacgtcctcagccgctggctcggcctctcgctcgacgacgctactgcggcagcggtcgcaggcgactttggcttgcttcaaacgtcctcggccggcctgtcgtcgactgccggtcactcggtccatcgcaagcagtcgacgactgcaagcagcggcccggacgccggcggatggctcctgatcggacctggccagagcatcgacatccatcggctcgccgggacgaattcagcaaccgctgtttctgctggatccgacgtcaaagcctgggacggctcgacgctggagcgcatggagctcgacgacgtcctctcacctggctcggccgccagcgacgccgcgctgccctcgctcgccgcgtctgacgccgatgtggctctcgcaccggcaaaccctgactcggacgaccctcggccggtcaagccgctctaccgccggtcgtcggccgcgcagccgcctcatctctactcgctcggctcgccgccgcccggcccgtcactgcctgccgggtcattagccacggccggtgctggcgacggcaatacgaccagctctgagccctcgtccggccagtatctccggctcgacctttcgctcgacctctcggttcgcaagacggccgccgccttcatcggcgccgacgagctcggtcgcctgctcgctctctcggccccaagcggcagcagtgcgggcgccggcggagcgagtctcgcccacttcggcgacggcctcgcgctcggtttgaactcgcttggttgagacggatctctgttgcgccgtgcctcgccgcgcctgttgtacccttctagctaccggacgaatctcgtttcactgtacgaccactagtatgacccttctccccttctcgagattggtagagagaatcattgaggtcgggccgcaagacggcgggctcgagcttctcgggcaggaaaggtgaccgggtctacgtcgtcgacgtcgtcgagcaaagagaagcgagcagcgcctgcaatgcaacgtcgagcgggtcagcggcgcgccaagtcgaaggttgcagaagaggaagacgcaccaggcgaggcccgtcttacgtcgagactggccactcctagtcaagccagaggggcggcgcgccttcttcgtcggtcgccaaaaagacgtgcacgacggaaacatagacttcagcgtcgtcggcccagcccgacataacgctcaagcggcgcaggctagggaaatgatcaggcctctctttaacaaagccacggatgtcgtagccgaggttggggtgccgttcgaagcgctcttcgggatcaggatcccggatctgagtccacttgaaattcagctcgccgttggagtcgtaaacgtcgctgggcggattcgacaggtcttggtcggtcgggaggcctatgccgagcgcctcgagatgcgcatggccgccttcgagagagagaacggcctcggggtcgcgatggaagaatgtgagcgcccgcagctgaggaaacatgagcagcgggttaagcgcgtcggccgggatggtatcatcgccgttgtgggagacgggccgaaagtgcgcggccgcgaggttcggccaaggctggagtcgcgagagaatggcctggtagacgacctcgtcaaagctgtagaagcacatttcctcgacggtggacggcagcaccgcaaacgccgagtcgagagttgacatgaagggcaacttctcgggatgccaccgacagccgaaggagcgcagcgagtcgaggccaaagagccacgtcaagcggtcggagtcgcggtcgccgatggcacgcgagataggcacgatgctgagcaccgccagctttggacgcttgaagttcgagaacggaaccttgtagtggagcggccagcgcaggtcgtgcagcgttgtgaggtttaagaggaggtgagagatgaagcagattgcctgagccttggcgttgctccaggggccgaatgtcacgctcgtgatgagctcgccgaggttcgagtgaccttggatcgccttgacaatggtactcggccgccgataccgcctgttagtgaggtcgatagcgccgctgtagagcttgagccgggctcgctgctgccgagcaaaagtagacatgcggtcgtcagcaggccgtcggccactgcgcgcggacctcttcggcagagagagggacggctcacaaggcaaacgtgcgagacaaagcgcattgtccgtagcaacttaatcgacgttcattcctcgcctccgtgtaagcagattcgccgctctgtctgagtttgcacctcgagcacccgtccaaagccctcaactcactgtcaaccaccgctagcgatagcgatagacttacacgacctctgcatcatatcgcaaaggcctcgggcttgatcgcataccggcagagccgcgagatgagccctccgagctggacctgggttccgacgccttcgagcacccgcatgtgcgtccagccgatctcctgcgggcggggaagacaattcagcggaggtcttcctctgagcgaggttgtgagaatctcactttgatgaactcgagcttggtaaactctggcagcctgtgccagtcaggggcgaagagcgggtcagcgagacacgcgacgccgcacgctctcaggacagacgcactcgtcaaacaccttgacgacacggaagacggtcgtgacgatgtcgatcgccgcatagccgtcctcccagagcgcgtcgagcttttcgagcgcgccgtcaatgtcgccctttgcgcaggaccgaagcatttgctggacgacgaccggatgcggctggtcgcacaccttgaagacgttttccgtcgtgataagtccaaagccagagtgcgtcgactggaggttgttgagcgcctgacgcatgtcgccctcggccgtaaagatgagcgacgacaggccgtcgtcggtcgtcttgacctgcggcgcggagtcgagacgtgttgcaaggtcagccgagctccgcgaacgacaggaattgcgctcggtatgacgcaccttctctgcctcgcagacctcgagcagccgcttgaggacctcgaggtctgtcaacttggcatagcggaggatcgcgcaacgcgactgaatcggctcaataattttgttcgacatgttgcacgcgagtgcaaagcgcgtcgtgtttgagtagatctccatcgtccgtcgcaaggcctgctgggcgccggccgtcatcctgaagaacgggcagggggaggtcaatggttgccggtgtcaggcgcgcattcgccgggacgcacgagtcggcctcgtcgaggatgacaatcttgtgccggccggccggcagcgagaccttcttctgcgcgaactgcttgatcttattgcggacaacgtcgatgccgctgcgagtgagggcgagggcgtgtcagctacagatgaagtgcgatcgtcagaagcagccggcaggcgaggtgaggggttgcgcaccgctcgtccgatgcgttgagctcgagcacgccctccttgtaggcattgccgagcaaagcgtgcgcgagacagtggatcgaggtcgtcttgccaataccgggcatgccctgcaggtagaaagcaaaggcaacgtcagcatcgggtacaagaaggggggccagaggagggccgagctcgtgagtggtcgcaccgagatgatgatgtgcggcatattgccgtcctcggcgatgaccttgagccgctcgaccgtctcgctgtttccgacgacatcctcgagcttgagcggccggtacttctcgaccctgctcgattccaaaagaggagcggtcagtcttgagggagcccgcacaaggtcgagctcaagcgagcgacgcgcaccagggcatctcgtacgcgacggccgaggcggcgacattagcaaaggcgccgaactttggttttgacgacgacgcgacggccgacggtccagacatggcggagagagctggcacgactggcctggtcgagctgcgggagggcgaggcgatggacgaccgaacgagggtcagcgttaggggcagcaggtcgagcccgcgctggacgcgcctttcggcggcgggcgtgcgaaagcaggatcgagctgcctggctgagcgtcgagccaggacccagcagcgccgctttttgtcgggaagctaggcaagatagcagcgcagatcactgtccacttgaaaaacaacgtctgcttaaagaagagacgactggggagccgtctgcaggtgcgcgcgagctgcctctcactcttctggctcgctcgcccgccctcctcctcctggccaccaaccacgactcccctccgaccgtccttcataacttataccttctctcaaaccttactccatcttattacttcctaccttctcgcactctcaagccgcccgccatgccctccttcgggtgcgtcctcctcgagtccagccggcggctctgagacccgcgcagcagctcctgctcgtctggcttctcgtcttgcccgctcgggcagcccagcctctctcctccttccagcgaatctcgctgctgaagagacgctgctctcctctcacagcgacattttcacggctgtctttctgctctcggtcgcggtcgcctttgtctgtcagtcgtctccgtttcgggcttgcttccgccctcagcccgtcggctagctcgcgtgcagctggccggctgctctcgcatccccgccgggttgagctgattgtcagctcgctttgccatcttacagatggctcccacatggtccgctcaacgttcgaccagacggtcaaggacacgaagaagacgatgaagcagtctggcatgtacgtcatcggctcctcctcgaagctcgctctgccatcactcgcaggtatgccatccgctctactgatacctccctcgcgcttgactttgcagcgactacgacgagaagcgtggtggcgtcgcgatcaagacggaccgccggcaggtcggtcaggaggactacgttcagcagacctcgcagtgcgtccttctctccagctcgtgcccgtctggccgcctctccatgccggtcgacgcctacgccgaagctgcccctcgacggctttgtacgctccggagccgagcttgcattggcggggcgtttgttcgtttgtcgagctcgcttggtcggctgctcgatgccagccgaggtcgctcgagctcgactgcgctcggccaacagacgccgtctcagactcggcttttttgtcgtcccgttttgcgtttctgcatgctgactcaactcttcttccttttgaacgatcagagcgatgctcaactcgtcaaagcgtctcgcaaagtcgggtgccgcgtccttcggtcactcgcaagtcgagcagtgaggcggtcgtcatcctccgtgcagagcaggcgttccgatgcttgatggctttgcgttccttcagcaacgcgtgcgagtagccttgttgagtaatcgatgtccggcatcgccggctcggttggtcctcgtcgtcgcagcactcatgcacgcaatgagcgagactaatcgtcgcaggcccgaatggacacccatcctgccttttctcaacacacagtaagggcgtgcgccaacgtcctcctcatcgtccgcgagcggatggctagaacttcggcccgccatcctgcgcttccgcttctcgtgtcgctcgtccttgacgcctgggcgtcagcgggccgcttcggtaacgagtgcgacaggagcggtgactcgtctgctgcgagtcgtgaagcgacgcaggctgacgaaagtccttgttctgcggcgggcggtttgcaagatcagaaatgacggtggtcagagacgtgcaagttttaggagcgggctcagacgtacgtgcggcgcggcgacgacggtcagcgctgccttctcggcttgcgtcagtcgcgctgttcgacgagcaacttctttcagcggtcaagcacaggtggagtgcgcgagagccagccagcgacgtaccgcacgtgtggtcaaaaaagcatgctgggttttgacatcgctgactctcgtcgagatcctgaacgaagcaagggaggacgggcactcgcataaagtgctgctcaggatcaaattcagccgacgcctcgcccgtagtgatgacgatgctgcgcacctgataggctatccgctcctccttgttcttgacagcgaacttcggcgctttcctgtacgaatgagactggtcgatgcgcatggcgaggggtgacgttgacggaccttggccgtgcgaggcactctcggccggtgcgtcgacctcctcttcgtcatcgtcgctcagctcccactgcccaacaaagttgtcgatgctcgactcgatcctgtcgtagaagtcgatggacggtgctggatctggcggagcggtaggcgaggcggacgaggaggttgaagcgccggaaactgcttctgggacgaccgatgcgcttgctcgactggcggcgtcggcgagctgcagacccagcctggcgaccggcacgtcttctggggagcgagcgggcttgattaaaagctcttggacgacccggtgaagcagtcgttcgggctttgttggtcgtttgatcttcgttggcttgggcgcggtctcaagggtcgctccgggcagattagttggttcgggagtcgtaccccgatcaacgctggctttgacagacagtcccgcgtgcgattagcttaggcagtcatcagtagctttgtgggcagcgcaactcctcgcccggcgcgccccagatgaagcgacgcactactgcctgggttaggtcgagtttggctgcaaagcgggaaagtcaagcgagccgatcagcaactcggcgggcgcaagcacgacaggcgatgacgtagtacgcacttgagtcgtgccgatagtcgcagggctttgtcgcatcgcagccagtcctgaggtactgccccttgcacggaaggtcgttcattgtaagaataaactgcgaagcggacgagtgtcagcaagcaggatcctcacggcgagcgctcgcgcacctagcgcacctcttaaagctcctgcagactctggtcggtcgtcgggtagggcgccgcatgctcgatcaggaacttcttccgctcgcgacgatggcggtaggtcgtcggcgtgtgtcgcggacgcgacaggcgtggctggaggcgcgcggtcgtcgatgacgccgccactcgaacgccgtgcctggacgggcgtcgaggaccggaagctcgaagtacttggaccggccatcggcttattgcggatcttttcgattgtcgcgctgacaggggccggagtcttgcttgcgccggcggtggccgcgggtttgaaggagcaccggacggcaacgacggggctgctgctggcggagaggaaacggcaggaagtgcgcttcccgacatgcgagcggcaagaacgggcggagtctctttcggaggcggcgtaggcggctgtacgagagaggggcttgtcagctgcggctgcgcgcgagcatcttgcacagggatcgtcgtctcgccaaggaacgcactcaactgctcggccgacccacgtcgccgctgataaccctctgcagggcgtccgattgcatcttgagcctgtcgagtagcaaaagaaggtcagctggagggaagaggtaaagcgacagcgacgacaggagcggacggacccttcatgctcccgactgagcgcgagccgaagccggtcaagctcagcctgcagtttctggtcctgctctatgaggcggtcgcgctcttgcggagtgctggagcgcgaggaggagcagatcagccatcgctgcctcaaaggtcacaagcccgggctatcgtcaaagggaagtctcgcggagcagcgcgcaccccgtgctttcgcgcttgagccgatgccgggcagcctcggtcgtccctagccggcccttccatgtctcgaccgatttcttgaggtcctcgacctcgaacgcgagctgagggtctaggtgtctgcagttggagagcgccgtggagggagcgagggcgaggtcagcttgaatagctcgagagttgagcacaagccgcccctagcgagccggagcgagggacagactggagctcgtctcgttcacggagcgacatgagcgtcatggcgggccagtcgagtcgggcgagcttatcgtgagggtaagattgaagaaggagggggtcgtcggagggtgagggctggcgagcgacagaagagattaagggccagcagtggagggcgcgacgttgctgcgcctgcccctgctttgtttgtcctcggcgcgcgcgatgcgtacgaccaggagcaccggcaccaagtccaagattcaaattggggtgcattgcataagggcgcagaagagggcagacagaccgaggaagtagaaaaagagacagagctgacacgcagagggcggcctcactcaccgagctcgcgccggatcgcctcacgcacctcgcgcaaaccgcctcccggcctccctccgccaaacaccctcccagggctgccactgccggcgagcgcgccaatcttgcggccgggggagagcgggacggcgccggacgagccttggagctcgacatagacggtcgaggtcgaggctggggtgaggagggtgatgaagtcgggcgtgagggtcgagagcagctgaagcgactcgcgcgcttcggctgcaggcggccgaagaaggaggttgccgagcggttcagccccagcgcatcagaaggtgagagcaacttctagggcatcgacgcaccaaacgagatttcaaccttagacgacttgacgaggacgttgcagacctcctcgatcgcgatcgctttccgccggacaacgcccgagaagccgccgggcgagccgccaccagcgagggcactcggcgaggtgaagagcctgtgagagggggccgatgtattcagcactgggagttatgttttccaaacagaggaggtcagcgcacatgaagacggcctcggcgacgcccgccagccgcgacagcgtgctccgccgcttgagctcctcgcgactgagcacgcgcagctcgggcgccttgcccttgttggctgcgcctccaccgggccggatgcccgcggcggcaaagaggccgccgagcggggcctgggcagcttctttggcagcgatccggtcgcggagcgactggcggcggtcggacgccggaggagctttcgtcggcgacgagggaggcgtgctggaggatgacgaaggggcaccggcgagcgtgccgctgcctgaagctggtgtcgacgacgacgccgacggcgagggaaagaggagccgtcggaccgactgcgagtggcccgactggggaggcgttggcagagcagccgtcgtcgcgcccgcaagccgaccgacgacgacaggcgtcgtcgaccctggtgagctcggcagaccgaggattgctgccccgctcgtcgcgccgctcgcggtgcttgcgcccggcagtggctggagcaccttcatcggcaacgtcggcccaccgccgagctcggcccagcgctcaagccgacgccggagcgcggcctcgcgcttctgctggtcggcgctccagcggccgatcgagccgacgacgcctcctgcgaagcccgagatgggcaggagaaggttgaaggcgtacgagtaggtctgggcgcgtgtgcccttggcgagcgttcgcgtcggagagagcgagagcgagaggagcgaccgggcagcgtcggtctcggcgggcgtgccggcctgcggcacaggaggaaggaagaacgggtcggtgggcgagtcgctcgatggcgtcggcgtcaacgggccggcagaaacgacgacggcctgcttgccgtccatctcgggaagcgcttggccgttccactcgtagagccaaagcagccgcttgaggtcgccgccggtgcacttacgccctgcgccgcgttcgatgacctcgcggatgccttttgtcccctcccagttcgcgaccccacggagcaggacggtcgactcggtcaagcctcgcggatcgcgcgcgagctcgcgagccgagggcggtgggagaacgggcggatgagcggcgagcgtgtgggcgagcgagagcgatagggccctgtggaaggcaaggaggtgcgagaggcctgttgggagcggggcagggaggtccgagacgtcgtgcttctcgtcgagagcatcgtccgatgacaatgatgtgggtgagcctggccgctgcgagccgaggccgagaggcgacgacgaggtcgagctcccggtgagcagcgaccggctgaagcgggcgggaggcgacggcgaggccggcatcggcccgctaaacgtcacgcgcggccgcttgcgcgagggcgagcgggccgcgccgggcgggaatggactgcccgtctgaggactaggcgtcgggagagccggcctgcgaggcattcgtatgagggatcagcgagagccggcatgttgagccatcgcttgcgcgcgcgcggggcgcacctcgaacgcttgaggaccggcgtcggaacggagggctcgccagcgagcgcccgtttggaggaagaggatgatgacatgcggagggtagagatggaggagatagggggtagcgcgcggagagagagagaataggaagaggttggggtggacggaaggaggcgagtcgtcgtcgagggcttgcaggggaggaggcaagctgcagcagaggaaagacaagacgaggcgggcgtgcgcagcagcatcagcagtcggtcgctccctcgagtgagtcgcaaaggactcgagaggacggtcatggaatagctggaagacagagacaactcggtagtgcatcgcatggtctcgaaagatcgaagacgagaagctcaacggaggggtgcaggcatgctgatggccgagcaagacgagcagaagctgctcgtcccatcaccccgccgccgccaaccatcaccaccgcacgtctagctctaaaggcggcccttcgcgagtcgacatgagcgcactcgcacatgtacgtcctaggctcgcctcgaaggcgccctgctgtctatcgagatagaagcgcttccagctgaccggcccgcctaaaccatcagcagcagcagcaccggccgccgcccgtactcgtccccgagctctacgccgagatcctccgacatcactggcaagcgctcggcgagctctggcggccgctcgatcgggacctgggcgtcatgtcccgagcccgctgggccgagtttgcagcgtgctgcctcgtctcgcgggcatggagggtgtgtcgctcgccctttctccccttgcttgtctccgacctgacagacggggctgacgtccgtccctcctctcgctcgcttgtccgcaggaagaaggccagaagatcctcttccgttccatctcgaccctctactttgacctcgcccggaagctcgagcagtgtccagcactcggccggcacgttcggcacgtcgagctcgacatcgactcgaccaacgacgccacggaggaggccctcttccgctcgctgccgctcctcccaaacctcgaggcgctcgacggcctccagcggctgacgtacttccacacgccaaagtgcccgatcgaccggccggccgcactctgctcgctcggcctacatctcgaacgctacgccgacatccgcccacccggttctgcggcgcgcgagacgagccacccaccgctctgcgccgcgctcgacgtcagctcccggctccgctcgctcgccttctcggccgaatggaacgtcgacgtctttcgcctgctcgacgaggcgtcgagcggactgacggcgctcgcgatcatcggcctcaacaccgagcatctcgcccgcttctacacgagcgacagcagcgggctcggccggtttggctcgcttcgctcgctcaagctcgaccttcgaggcccgcttccctccgctgcacgcccggccttcccgttcgagctcgtccgagacctcgagcagctgctccttccgctcgagctcagccctggcgcgctcgtcggaacgcacaagaagctcacgacgctcgtcctcggccatatggccttcgataggcgctcggcggcgctcggcctgcgcgtgctcgaccaggcctactcagtcctctctgcatcgccgtcgccgtttccgtcgctccggactgtcaaactcggcgcctatgagggcgacgactactcgttcatctcgccgccgacggccgaggcgtttgagtgcaggctcgtcgaggccgccgacaagctccggcaagtgggcatcgagctcgtcgtttttcaagggtatgacatcgagtgggactgatgggcttgcaggcgagaaattgttttccagcgggcctgtcgtgcgtcttctctagctttgtaccaggtcgactccctctcgctacgatcgctgaccaacgaccgctcgccctggcccgtctgacctactgatccgccgccgctatccttcaggttagtcgggcgatctgtaccctctagctcgctcgccaagtatcaaggctgcctctcgcccgcacgggtctgcgctcttcaacggacgacgtctgacgattcgggacgttccagcggccgccagcccaacgcggccccgatcgacgagcagacgaggcgcgagggagagaggcaagacgcaagacacggtaacccgaaccgggccgcggctgaagctgcttgctgctggaccgcacagcgggcagcaaaatcggccggccgagccccttccatgactcgacgagggggagacccgagatccggccgccgctgctcctcctgttagacgagggcaagggacagcttcgaaaactctctcctcctcctcttgccagtcctaccctgtcgagtctgcgggccgcaccgctccaagcccgccattccatcgcccgctcgcccttccctcgcccgccccttccgtcgtgctcgcgctcgcctcgtcaccctcttgcctgagcccaaccggactcgagcgagcgatcgagcgacctcacgcaaaacagcccggtcgaaaaccccagtttagagggcgatcgatgaagtcgtcgtcggagtctgacatgcgtctttcaaaatctactcgcgtctgcgcgggattgcttcgtcgataggttgtccgtctcgtcaggcagtcagttaggtcagtcagtcaggttgggtcagtcactcaggtcagtaactcaggagttgtagcggtcggtctgtccatcgggcgcgagaaaacgagcgccaattgtacgctggctcaaaagagcgtgagggagggagtgctttggaacgcgtacatgccatgccttgacaagcgagaatcgagcgggcgagcgacgcccaaaaggaacgaacgggggcgccaggtggggggtcccgacctcactactctcgcgcgtcccccccccccagcatacactcatcatacacacgcacacatacgcactcatagcattgcatggtcagcctcattttgaaacccgctgcaatcgtcttgcctggtcgccctgctcggccgctctgtctagccggcctatatgcgtcctcgctgatcgccgcggcaggcacggcccttgaatcgacctccatcggacgaccaacgggcaaggtcagacttcctacctgcctagagtgccggtcctgtactctttcaaagcagggagctgagcgacaggctgaaggtcgtgcgcctcccctgtaggcagacatgccgggcgccgcgcgagcaagccttcggccgagcactcgattcgcctcgccgcctctcctgcaaccaccgccaccgaatccgaccgtcacctcggcaaactaggatggtcgacttccgcgtcagtagtggtcccttctgaaaggccgcattggcctgccgctcaacctcctgccgagacgaagagactgacgccccctccgtcgttcgcacccctgtctcgacctcggcgctcgctcctgcccttatgcgccgtactctctccttcctttgcgggtcatcgacactatttctctcctccgatgcatacttctccgcttccactcaacgaacagggcttcgcacgcgacctcggctccaaggggaggtgcgacgcttccctcctcggcgggccgggctgagctggcttccctcgactaggagctgacctctcccggctccctcttcattcaacattgacctgcatcttcatatgcgctccaggtttggcttcctctggtgcgcactcctgctttcctctgccgacgaggggtagctctgcttggctcgcgcctcttatcgagctgacgggctcccctttccccgccacctcgccttgccttccccttccttccatctggctcgcgacctcattccatccgcttttgacttttgactacccttttgcaggctggcagcgaccgtcggctcaagcgtgcgtcctcgtttccacagcagctggccgagagaagggaggctcgagtgctgcgcgcacgagccccttttccagtcgcgcgccacccctccctgcccaacttccccgtcttggcctacctccaacgccgtgtcctctcgtgctgatgatgacttcggctgaaactactgctccccgtcggtacgcacttctcttgtaggaccgctcgctctccaaggccaagctgcttaagatcgacctatctcgggcctgcgacgagattggccgctcagccggcgccgcgccaggtcttctgcctccggcggaggagttgacgacctccgaagaggaggaagaggagaaggaggaggttccgaagcggaaacggcgggtcgtaaaaaagaaacggcgcgtaggggcggctgctgaggctgaggagggcgcgctcggtttgaggctgagtgctaacctgctgctcggcgtcgcgcggtccgtcgctcacttttccaagtctttgagggagttggcctgctgaatctggagcaacttcaacgcttatttggcagggtgtacgaactccaggtgcacgcagcttccgtctgtcatctctcgcctgccaattcttcacccttctcagcaaactgaccaaccctcgcgcctccccatcgacaacagagtgaggctgtccagatctttctcagcctgcggccgggcttcatggacgagtactttgcaccggccggcgctgcgccgagcgcccgcggtggcaaaggccggccgagtgtcgccgggctcgacatgaccgagacgtgcgtccccagccagcttcgtcttcttttcaagtgctgaactagctatctgctcgacaggacggtcaacattgacgcgccgctcgaagaggaggccggcgacgaccttgctttcgcatttgacttcggcggcgacgtgcgtcgtcaggtctcccttgcactgccttcagctaactgactgcctctctggccctcaatcgacgaacaggcctgggaagacctcggctatggcagcgtgccaagctggacgaccgtccaggatcagccttcggccggcggcatggagctcgaggagggagacggtgcgcccgacaaagctttgcgccctcatccagcatgaactaactcgtgctgaccgtgttgctcttgtatgtcaatcggtcgagcagtcgagatcggacgcgaacgggcccggggaatgacgccgcttgggcggccttcttccatgtgcgcatcacccaccactcgaggctgcaagccccctaaattgctgacctccctttgctccctctaacgtcagcctgagcggcctgcgctcacccggcctcctttcgatcggcgatcggcggccgtctgagccgccgtacggcctaccagccgagccagagtacgagccgctcgacctcggccttgacctcgggctcgaggagcggccgtttgacgacgttggccggccgagcagtgtcgctggccccgagtacgagtgcgtgctcatcttgttctggccgtcacctttcgctgaacaagacaattccctttcgttgacgccggcctcagctacggcggtggtatggattaccagccggatgagggcgccgcctttgcagacatccccgagctgccaccggccggccttggcgaggtccctgcacctgcgccgcctcaggagcccgtatgtactcgcgaggctcgatcaagtgcccctgtcagcgcaagactctaatccagccgacttgcgccggctcaaccaggtcgcacccgcacccgaggccggcgcgccagaggctccagctataccgcccggtctcgagctgcctgcccggccgcgacctatcctcaagcccgagggtgcgatcgctggtgccggccaacgtaagcgcaaaaagacggtccggctcgccgtccgggacgaggcgctcacctacgccgatgaaggtgcgaagcgctggcaacaaccgttatgcgcaagaaggtcatcgctgacctttgccgatcgcacttgacccttggcagagattcgcgagtggcgggcgacgtatgtcgaccgcatgctcgaccaggggtacgttcggttgttggccttatctgcctgccaagattgacgcccgtccctcttcgagcaggcaggcgcagcgccagcggttcgacgagcgggccgttcgccagcaggccgacgacatgctgcttggtatgccggaccttctcggatgtgagttggcccggcttgtccgtcgcggggcggatgctgatccttcaccaacctcttcgccttgtagtccgtgaccaggacatgaccgagttgtacgtgcgacatctcggaaactgatagcgtgaggtacctgactcgacgactctcgcacagctacctcgagcagcagaatcggcggcgggcctttgaggcggcccctcgtttgtctcctttgtgaccgactgcgagtcccgctgcgctgctgaccccttcttctctccgtcaacagccggtgtcgaagccggggagggagctggtccgcccggcccacccgcgccaccggccccggcgtcgccggccgcaagcgaggacgcacgccgtcggcgggctgagggggagttctttgcacggcagggaatgggcggcgccgaggaaatgcgcccagaggggatggaatacgttgagtacgagtaccgttcgtcgtctctctgaccgtacatcttgacgagcacccaatttgaccgtttttggccctcctcgacagctctcgcccccgaggtctcgcgcgaggacatcgaggttgagcttggccggcgcgcctcgagcgtcgagcgtcggctgtcggccgcaccggtgcgtctcagatgagctgcttgcgctgttacgaccgctaacagatctccttgtagtgggaggtctcttcgatcggaggccgcgagccgtcggtcggccgtgcgttctcgtttttgccgttctctctcgcgacttgctgctcagctgacccctttctttgttaaacccctcagtcgagggcatcggtgccccgccgtcggtcggacgtccgagcagcgttcccgagagcgagtgagtacatcgatgacaagtcaaagggcgtcggctgcttactgcctattgaactgcagtatcctcgccggccgccggcctcgcccgcgggcgttgtcgcgtgcctcggtcgagcgtgagagcgtcgccggcctcgaaggtgcgtcaataattcaggtcaagcactcgatgtcattgctcactgactcggagaacgactctcgccgccaggcatggagggcgaagggccggtcgagggcctcatcgaactcgagcgcgagtcgcttgcgcctaccgcgacgaccgcctcccgggcccagcagcagttcttagagttcgtacgcggcgctcctcttgccgcttgcgacgatgctgacctcctcacttctctcggtcagctacctcaagacaatgctggccggcgagcccgagccgtcgccgccgccgtccccgcccgccggccagccccctgcgccgccgcgtcgcaaagaggtcgcattctcgacgctcgtcccgaccgacacgtgcactccaatcgtcgcggcaaagggattttaccagctgctcggtgcgcccctccctgcttggcatgcgcagagtctcgtccacgatgctgacccgcacctgctgtcgtgtcgatgcagtgctcgccacccgagacgccattgccgtccgccagcccgagtcgttcggcgagcttttcgtcgccatcaaggagcagccgcaggccgaaacgaccgcacacgatgagccgcagcagtcggcgtacgacgacgaccagaccgagagcatggatgtcgacgagccttgacgcagccgttgaggacgctgccatcacaggacaacggcggctcccttttctttcaatctccctctcttcggtctccatcagcccccatactcgctgctcgctccactcccgcttgtacattcgccctgctcggccctcacgataggccatctctccctcttttgctgctcctctctcctcgagtcccgtctccatgtcaagatgtcgcttcaagaccgtgaaaaggggtttatcaagagaggggccgagggcgcccacaggagaggtcgtgatggggtccgggggtcaggtcaaagcggtcgaggtcagggctcgtagagcaccgagggcgaagcaatcgaagaagctggcgagggacgataagcgcagggcgaggcgtttagttgcagcctcgctgctgcatccacgacggatggagagggacgcacaatcgagagagactagtagcgcagaggcgttgggaggcgagaggggtcgtgaagagcggtctagaggctgcgtcgttcagtgtgtgccgaggccaagccgggtagggaggcgaaggcatctagccggagcggacgttcgacgacgacggttgatagaattggccggccggcggcatgatcggatgctgttggtgtgagaaggtaccatagccgtggcttcctacagagtgcggcgggtagatcgtcggataggtgccgttgacgccgagagggacgtcgctgccgctgacgggagggagcgagacgtaccctccgacggcgagcggcgaggggtgcgtgtacccgccggagccggccggagagggcgagaagggcggcagtgatgtctgcgagaggtagccgccgctgacagcgctgcttgtactgagccgtcgtccgccgccgccgttgtgttcgacgtagagcgacgtagtggacccggtcgaggttgacagctccatcaggctcgggtcataaagagcgctcgggtcctcgtcgagctcgtacgcgagctcgtcatcgtcctcctcggtgtagtccgagtgggcggtgcctgtgccgtcggaagtttgcggagcggctaggtcagggctgaccggcgtcggctcctcgaggactgaagtgtcgaccttgacggccgctgtgccggacatcggcgcgccgcttccgccgccaacccctccgcccagcacaaccccgctcccgcctttccccttccccttccggctccgcgccggcacgccacacttgtagacgcactcgcgcccggcccgcgcacaaggcgcgcaaggtgtccctcccgggcacttcttctttagcgagcggcaagacgtgcaggctgggtcgcggagcgtgcgcgcttggcgattccggtgaggcttcggctcgtcgccaccggtgccgctgcgaccgccgccaccgttggcgccggacgagctgctgccaccgccgcgagccccttcgttgcctgatgatgatctcttgctctcccctttgtcgcggccgtaggagggattgccaccgccgccgccgttcgcgctaccggtgctgtcgaccgccgctcccgcttggcttgcgatcgcgaacgactcgccgccggctgtttcagatgttcctgccgtgaccaggactgccgacggtgtccgaagcacgctcgtcgacgctggtggcgagtgaaagctcgcatcggcgaggatttcgagtgcggccgaagccgaggtggaggcggaggtcgagcaagaggagacggaggtgtgagtgttggaggaggagggttcgctcagctgggagagcgagaaaggccagcctccgagtgtggtggcgcatgcggtggcgacggcaggattcgtcggagagacggagctggacactggagcaagaatggccgaggttccggcgctgggcgaggtagcgatgagcgcaaaggcgccgagtgggtcggacgcaagaccgaggtcgactgagtcgatgtccatcgcctcaggcgctggagaggcagcgccgctctcagtctgaatgacgacggtcggcggagacggcactggtgctgaagcgctggaggggatcgggattgggcctgtgggctgggcctaagaagataaggagatggtcgggttagtcatcgggccgacagggggcctcgttcacaggagagcaaaggacggacctcggacccgtcaaagccgccgctgccagtggctacacccgtcccctcgccagcctcgtgagaggcgctcgtgcttgaatgctcactcctccgcacgcccacgatcgggtacgcacagccgaccccgagtttggtgcagcgcacgcatggcgtgcagcccgggcagcccttctttgcgcgccggcaagcggtgcagctcggcacggcgaggttgtcgagcgaacaatcggtgggcgaggagtgaccgacgctgacgagaggcgcggctgctgacatcgtcggagacgggccggtacgcgtcgcgcgaacgccggttccggcggcgggcggcggcgggaggcgcttgctccctccgccggcggacgtcgacgacgacgagggtcggacgggtcggttgactgccgtccctcctcctcctgtagctaacgccggcacgctcctgctagctgtcctcatcgtcgagcttggttcagcgggctgagggagggtcgatgtgctgccgcgcaccgcagcgcccttgagtgctgagccggagctggccgccgtcttggccggcggcgcacgcctgacgacccgcggccgaagcgggatgagtgtttgcggtaggccgctcgagcccggcagcccagcatcggcatcaccttcggcgctgctgccagcgtcctgcacgtcgttgatggccgctgatggtggcggcggcgaggcgaagccggagttggagccgacccgcgccgcgaggccgagcgtcgtccggtccatcctgagctcgcgcgctcggagtggatggcggaagagatggagggccggcgagcggtcgaccgtctgcggcggagggtcggtgtaggggtagaacatggtcgaagtcggagagatgaccggtacaagctgctgcggcgggggagatgggcccgggggcggagtctcaacggctcagcggcagcagcagcgagaggggaggtgcaaggggtcgacagcctgtcctccatcaccgacacatacgattctcaaagatggctccttctgctgtcgaattgctcgcaaaggcccagaagaaggtcgccagctcgaccggctggttctcgtcctcatcgacaaagttcgaggaggccggcgacctggtgcgtcccgcgccgccggcgagacggatcggatctcgaggccagccgggctgacaagacgcccttcgttggacaccggcccgacctacagttccagcaggcggccaatgcgttcaagattgagaagaactgggactcgtccggccgggcgtttgacaggtgcggcccactggcatccgaagagctcatctcgcgcgagagggagaggcgaggcggcgggcggctgcgcaggcgtcgtctgcagcacgaggaggaggcaacggctgcagcatggcccgaagctacctggatcggctggttaggcgtgagcaggtctactccaccgggtggccgagttggcgttgggcccatcgtagagctcgtaccggctgaacgagctcgtcttggcgagaggaggcgacgtcgttcgtcaccttgcgtacagcctggcctccgaccgtccctgtctttcccggcgacctctcgtctttcctaccttaattgaccttgctgatctctctctttactgtatttccgctcgcagcgaggctcaggctcggctcaaggcaaacgagaaggacgatgcgatccaggcgtactggaacgcctccaagtcgtccgcccctgcctttcgtcgcccctgcccgcgctctcgtgcgctcgtctgacccttgacggcctaccctttacgtctgcgttgcttgacagctacaagaagtcgccctcgctctcggccgtcccggacgcggtcaactcgctcacgctcgccatcacgctcttgaccgagcagggccgcttccgccaggcggccgaccggcagaaggaggtcggcaacatccttaaggagggcggcgacctgccggccgcacgggatgcgttcgagaaggctggcgagtggtactcgatggaggacgcaaacgcgtgggtcgctctctccctcgctctcaatggcgcctgtgacgaccggcccggctggctgacgtttgatcttctcaatgcggcggcgctcaggacggctaacgccatcctcaaagaggcagccgagctgagcggcacgctcggcgactataagcgcgcggtcgacgtatttgtccaggtcggcgagtggagcttgacgagcccgctgacaaagtacagcgtcaaggagctttggctaaaggctgggctctggtgcgtgccgctcgtcgcgcaatgccgctgtcgcacgacatcgctgacgccattttatcgctcgcgacgtcccatcagcgcccttgcatcggaggacgtcgtcctcgcacgcaacctgctcgacaagtttgctcagcaaggtccgtccgccgcctttcccccgtccctccgagcctcgccttccgacgagtctcgattagacgctcgaacgcgagctgacctctcctccgccaccgtcgccgacagacgttaccttcccgtcgacgcgcgaggcccgcttcctgaatgcgattacgaacgctgctgctgacggggacgtcgaggcatttgtgcgtcctccttctcgttgccttacgcagccttgactgaacccctcactaacgtcctccgccttccctgcccgtgcggcaccgccagacggcccacgtcgttgaatacgaccaggtgacaaagctcgacaactggaagacggcgctattgctcaagatcaagaacctgtgcagcgggagcgactcgctcgcctgagggcaacaccgggacgccgggatgggctccgcttgcggggctgtcctttgctttacctttttctccagccgacggtacggtcaagggcgcctgcgatccgccttgcgcggcgctctacttccgccgcagagcttccgtcctctcgcctctttttccacgaccctgtcttccttgtgcgctcgatcatgtactccccggtccgcctgcttgctggcagcgaggtgtctggggtaaagtggccgtcgagaggtgtcagcggggttggtgtgcggggcgacaactgccgcctgccgggcccgctcgtctcgccgttgcgagttggcggggcggcgaggacagatgggctgagctcgcctgctcgacgacggcacctcctccagaacccccaaacctcacattacgacgaaaagatggcacctgtcccagttacgagcacggccaacctcccggaggaggcccagcgcttcgagagaaagttcaacgcggacgagcccacgttgcgcaagattgtcaaggcgttccgcgacgagtttggtcagggtgcgtcgtcccttcgcctgtctgggaccgttcgtccgaagcagccctggagctgatgcgtgtccttgtgctgtcgtgctgctgctcgcaggcctgacgacctacggcaaagatgtcgccatgatcccgtcctacatcaccggcgtcccggacggcagcgagcaggggttcgtcgtcattgcctctcgtccttcgaccggcatgccaggctgcctctcgctaggggacagacgtcgctgacctgctgctgctttcctcgctccagtacgttcctcgcgctcgacctcggaggaaccaacctgtgcgtcccatcctctttggcccaggagatggtgtcgcgagctccccgctcgacttcgcgcgcgcgcgctcgcccagctgacgtctgtcgcactggcttggcaggcgtgtctgcgaggtcaagctcgaaggcggcaacaccttttcgatcaagcagcagaagtacaaggtttcggacgcgctcaagcggggcgacgctcgcgacctctttggtgcgtttgccgccgtttgcaggcctgggaggatatcgtcagccctcgggccttacgggaagaaggtctcgcgacgtcatctcgggagtcggcctgctgaccgccgccttccctcctctcgtctggtacggcagactacattgctgagagcgtcgacgagttcctgaccgagattggcaccgaggccgaggccggcgaggagattcacctcggcttcaccttctcgtgcgttgcgacgtgcggctgtcggctcgagctggaggcagcgctgacggagccttgcgctcctctttaggttccctgtcgagcagacggcactcgcctcgggtaagatcctgacgtggacaaagggtttcagcgcgacgaatgcgatcggcaacgacgtcgtcaagctgctccaggacgcgctcgaccgcaagcacattcacgttctcgtcagcgcgctcgtcaacgacaccgtcggcacgatgctctctgcctcgtaccagcacggcccggcaatcgtcggcgccatctttggtaccggcacgaacggcgcctacctcgagcaggtcagcaagatcaccaagctcggcgacgactttatcaagaaccagcgcgagcggatcggcccttacatggttgtcaacaccgaatggggagcgctcgacaacggccgtgccgtcctgcccatcaccctctttgacgccaagctcgaccgcgagtcgatcaacccgtgcgtcttccgccttcttgccttgtccacgcggggcgcagagcttaccctccccctctttgtgcgtggcagccataagcaggcgtttgagaagctcatctcgggcatgtaccttggcgaaattctccgcaacatgctcatccactttatcgactgcgacctgctgttctccggctggtcgaccaagacgctcaacacgcactacgccatcgacacgtccttcctctcgtttgttgaggccgcgatcgacacgccgtcatcatcatccccgtcgtcgggtctgagcgcagccgaccaggccgtcaaggatctgattgtccgcgacctcggcgttgacgccgccggcatctccgaggccgacattcagctcgtcaaatggggcgtccaggccgtcggcggccgggcggcccagatgagcgcgtgcgcgattgcttgcatcgtcgagcacacggccgacgacaaggacgccgacccggaggcaatcctcgacgtcggcattgacggatcgtacgtcgacctatcctcccctctacttttgccgccagtgctgacccgacaatttgcctcgcctcgcctcagggtggccgagctctacccgcatttccgcgagcgcgtcaacgcgacgcttctgacgctgctcggcgacaagacggccaagcgcgtgcgcatcggcctcgccaaggacggcagcggtgtcggcggtgcgtcccgattggctgcggccgacaaactctgcgcgaacacgtcgactgaccttcgcacgctttccctctgcccgtgacttccagccgccctcgccgcgctgcaagccaagaaggacctcgacgccatcgcgctcgcgaagtagaggattgtcgtgccagagagaggagagcagggggaggcctgccacttgtaatctgcttttacatttcatgagtgaacgatcaagagcgtcgtgtcgggaggcaggttcggcagcgacaggctcaactcgagtccggccgctgacgttggtccttcatcgacttcagaaaacggtcatgcgagatgtctacatctaggaggaaggcaggaagaagcggtctacatccggcccttgagcccgccgaggacgaggtagcgagcggcaaacagcaagccgacgccggaaaagacgacgctgccagagaagccggcgacgtgcatgtacgactcgccggtcgcgccgaggatcgcgcccgagatgggcgggccgacgagggcggcgagcgagaggcaggtcgtcagcatgcccatccggcgaccaacgtcgtgcgtctgttgccgtgggaggaaggagagagacagagagagagtcagcgcctcggctgagaaagcacgcgccagtagaagacacgcacctcgccgagctgagcgacacctgggctgaagagcgagacaaatgcgcccgtcgctgctccataaaagattgcgaagacgatgagggaggtccgggtcacgcagatcggccagatgaacatctgtgcgagaaagcgggcgagtaggacagagtcgtcaggatgcagcactgatctgtgcacacggccaaggtgaaagcgacgcaccatgatgccggcaaggaaggacgctggtagcagcatgttgacgggtccgaccttgtcaccgaaactgcaagaacgagacagggcgggagcatcagctcatgctcatcgcttccaagaagatgacgctacgcactagcctggaatgattcggccgaggatcgagctcgcattggcgatcgagaccaggtaagacgagaaagagccgagtcctgcggccgttccgctgacgtcgatgtatgacagcggcgtgtagaggctgaaaggaaagcgcgaatgttagcatgcttaaaaatgacaaaggctgatgggaaaggggcgtaccccaacatgatgaggaagcagccggcgacgtagagcgagaaggtcggcgtcttgaaagcgccgaagttgaacataccgcccttgacgttctttggcggcagccggggccggagagtgaaccagccgaacgtgacgaggtagaggatgaggaagccgcagacgcgctgcgtccaagcgtagctgcgaagcggcgagaatgtcagcttcatgtcaataagatgcgataaaagacagcacataccctattcttggcagcagctggcggatgaggatgggaaagacggtgccgcccatgctagagccgcaagcagtcactccgaaggcgagcgcacgtcgtttcttgaaccaatgggcgacgatggcaagagtgggtccaaagaggactgcgcgagggcgggtgcgggagaagaaggaggtcagctactctgccgaaagctgcgacgagaaccggggaaaggcacatgcctccggcgctgatgccgacaaggacgccctgggcgagcaggacctggtaaaactcggtcgtctgggcggcgagaaagagcgagacgacgtaggtgacacagccgcaggtgaatggtaggaggaagatgccgatgtccatcaaccggccgagaacgacggccgggacgaagatgaggcagtactgaaggctaccgatccacgctctgcgaaggagggagaggccagttagcgggcgagggtggggtgatggcaggcgggcgctgggacgtacaaacttgaggccgactggccgctgaggccggtctccatgtagtaggcttgccagacgccccacgagttcgtcatgccaaagcaggcgaaggtcctgtcagagaagggaggtttaggggattagagccggtcagccgatagatcgggggcccctcggaggctgaccgcgaagacgtacatgtggacagcgccggcgacgacaagcctgatcagcggagggcaaaggttgccagtcagctcaagccgcctgaagcccgtggccagtgccggttgtgacgtaccatgctcgaaaaccgccatccgggaagtcgatatcgtcgtccgtcagctccttctcctcggccgcgccgagcgtctcgaccggcaggcgctgctcgtacgccagatcgggtttgggcgggagcgcgaacgcggccttgagtgaaccagccttggtggagtgtgagctcctccggctgtcgtcaatgtgcaaggcctcgatggcgtctgactcgagctgctcgggcttgtcgtcgtcgtggagcgcctcgtgcagcgtcggcgacggcggcggcggcggcggcggcggccggttgccggctgatgcgctctgctcctgagcggcgacgtcgacggccatcgtgcggatgccgttacgagggtgggtgtagggaaaggttcgctgagaaggtcgtcgtcgttgtcaggtcagcggctccccttaaagagtcagagagggtgtgggctgaaagcagctcaggccttcctccggcggaggccggcgccgcggcggagccggcgatgcaaccggccggcccgtcgcgcagcaggctttgctccgggcggattggtcacgacgtcgtggcagcgtgactgagcaggcggcacacgagccgcggctcgcgctctttcttcagcggacagacgacacgacacgacgggcttgggccaagcaggagtgtgtacagcggggtgtcggtggtttgagggacggtatagaggcggaggtgaagcgagcgcgcaaggcgaggtttttttgcaagaggggaggaaaacacagccgtttactcgctggagggatgccaaggcgagacgtcgaagaacgaggatgacagagaagaagcattgaggcgcggaagggtgcaaggcgggccggacgagaagactggtcagtcagcgtgccggcctgtcgacgggccgtcgttccaacaggtagcgacagccggctgacagagtaagggagcaggacgcacccaataaacatgcggacgataatgtaggcgaccgagccgatgaagcggaagactgcacgagggacggcaggcatgtggagggtcagcccgcgagagcggcgcgcgtccgcaggagaggaaaaaacgcacgagcgaggacgacgacggcgtagaggacgatcgtcaggtagatcgactgtcgaggcatgtcagtcagcatggctcctcagcctccgcgaaggtcaatctcgactcaccgtcgattgctggacatcgcccgtgtcagtgtagctcgtagagaacgtcgacgacgccgtcagaacgatggcgacgaggaagccgttggacaggacccaggcgagtagaagctgccgtcaaagggaggagtcagcgttgagctctcttgggtgaggcggaacgcaagacgggcgcaccctcgtccggaaggccttgtagtagtcctcctgggcgtcctcggggctaacgcgctcaacgaccttgggcttgggcgcggccagaatcttggccgcgtcgtcgtattcggcgtcgaggtcctgcgtgtcctcgctgcaggcgagcacaggagggccgtttcggtcatcgtcagtccagcagcagaagaggtgaggtcgagcagacgcacgtgacgtcgacgtcggccgtgtccttgttgccgtcgcccttgcccgaggtgacgacgccgaggtcggtcgcgaccttgtcctggcctttggtgccccatgagacgtcgtgcgtgttgcagaaggcgtagacgttcatgaccgagatgtaagacggcgcaatcagcaggtactggacgagcgaggtcaccatgtgccaagggtcgtaatggatgagcgaggcaaggacgtaaatgccgaacgtcgcgaggattgagaggacgatctgaacaaaggcgactgatgcggagaaaacccagccgagtatcaacacgatgagcagatgatggtttggtcgagcgcgcgaagacgtacggttgctcatgaggctcttgatggtgaatgcgccggcctcctgcatcgtcttgatcgatttgaaggcgatccaaaaggcggcgaacgtcatatacacggtgactgcaaggagagtcgaaaagagtggatcagccagcgtgacgatcatgacggcgatgagaagagcacgcactgatcgcaaacgtgacgaacgccatcgagtagccccactttgagccctttggccggttgccgagagccatgatgaagcaggccatcgtcaggccggcgtagacgtaggtcaggatgaggttgagccacttgagggcgggcgtgaacgactccatgctctgcgtgaggacgtagaaggctgggggcggcagcaggtgtcagtctgagctctccggcttcagcgcacgcacgaagggacgcaccgataaagtagttgccgatcgcaaaccacgagaagacgagctggatcgcctggtagaggatgaggatgtggagaaagaacttgcgcgtcgcgctgtgccgcgagcggtagaggtagtagaagtggaacgtcgcatggagcgaggcaaagaaggagccgttgagccagcgccggcgctgactgacgaggtcggggatctgccggcgagtagcaagtcagatcgagccaagcgcagagagccgaaagacacgagagacggaccgtgtcgggcacgtcggtgatgccgtaggcgctcttgacgtagtggaggtgccagctcgagtccttcttggagacgagctcccagcagagaatgcggtcctcggcgaggtacatgttggcgtcaaagatgccggcgctgaatgaggagagaggtgggcgtcaatcgcaggcaccaaagtcgagcgggcgaagatcctcgcgcagacccactcggctccgtgcatcgtttcgccgaggaagtactctgcgggccagggaaggtgtcggtcagtctcagtcggccggtcagagcttgcttgcgagcccaggtcgcccggacgtactctggagggggccctcgcccgtttgagggtcgttctggagcgcgatgtagcggtaggcggagaaggctccgggcaagacgctgatgaagccaaagacgctctcgagcggcttgtccaggatgttggacattttgtactgatgaggagagggtgtcgcgcgcggtcagccaagtgagcccgtcggcagagcgtgatcgaagggagccagcgtacctcgaagttctgggcggcgacgagcgggttctttgcgagggtcgaccagtagcggcccttgagggcgacaatctcgccgcaggccccgccgacctcgctgttgaggtcaaacgacttccagaggtggtagatcgagtgcgggccgggctgggtgccgacgtcgatcaggacgcagacgttggggacaagaatctggccaaaggcgttaaagaaccagcggtgcgagttgagcttcttttgattacgctctttaaggcagaagaggagctggacgggcacgctgtcggcgttgccgggcacaatctggagcttgctgttaacccggagctgggtcgtgtactcgtagacatgagccgtcaccgccttaccattgacgacgttcttggccggcccgggctggtagcagccgagcttctggatgcaggcgagcgtccgcgggtgaatcttctgccggccgtcagagacgatgcaaacgacgaccttctgccagcccttgtcgttccacgtccggctcttggactttgtgcagagatagtcgatgttctgcatgacgcctcggagcgtccggaggaagagctcgtcgtcctcgttgtactagcgcagtgaggggagggcaggggggtcagctcgcacatttctcaagggaggccgcggtcgggcgcaccatggtaaggacaatgaagagctccgtcttgcgcgtctcggggtagagaatctgccggagggcgtagcggtcggccctggagggtcccgagaggtaagggtgtcaattgactgccggcggacggacgggggcaagcccgccagagcagtctcgcgagcggtcgcgggaacgcacttgaacatgtccgggtcgcaggtcacggccgtgtagcgcatgacggcaaactcgttgccatcccgctcgcggacgctgtcgagcagccgtttcgggacggggcagtcgagcacgagatggcccatgaaaagctcgaccttgcggaccgtcttgttgcgccgggggacgcgcgacgggaccggaccgtaatgcatctgccggctgctggccgagttgccgccatctgctccgccggcgttgaagtcgtcgtcagagtcgttcgggtcgttgaccgaaggtgcgtagagcgggtgatgtgatggcgccgggtccgagaggtcgaagccgcccggcatcggggcgtaggccgagctgctgccaccagtcgtccgagggaggagccggacgtcgtcgccgtcgtcgaaggacgcccggccgccaccgggatgccagctgtcgacggccggccgctgctgctgctgcagcgagtagctcgacgtgctcggcccgagggcggcggccgacgaggctaggcttgaggcgtgcgaatcgtaccggttccgaggaccgagctgaccgcttccaggagggggaggcgagcttgcatgggcaagggagtgcgcgccagcgtttgacggcggagggaaggcggcgaacgacgggtgctgcgactgcgcgccgtaagctgggctcgggctcgacccggtcggcggtagcagagggagaggcgacgtccagcctccggtcgacccgacatggccgctcgctgacgaggcgtagccgggcgtcgactgacgcggcggggcgtaggggtcggcgtaggtcgagccgtacggctgctgttgctgttgctgctgctggtactgagccagcggaggcggcggaggcggaggcgtctgggtgtgatagagcacgggcggaggcgaaaaggtcggctgaggcggaggttgctgctgctgctgctggcagttgccgccgccagaggagtaggcgttcgggtcgggctgaagggaagaagaggaggcgcgtcggtcgtcaaagggaggcgcgagcgaggagcggcaaagatggcaggatgggcgtcgcgtcagcatgagctcgtgtgacgagcgagcatgtcgtctcgactgaccgggtactggtaagccatcgtcgaggtgtcgtggtggttgatggggcgtctgtcgaacaggagaaggcacgacgagaggaagccaaggccgtgttcgctgctgcggcccgtcgtcacttaggtcgcttgcacgcgtcggggctatcttagccaatcgggggttctggttgggccagaacgcgcgctggtgacgatcgccttgtcccctccgcctcctacggctccttcctcaccccaccacctcgctcaactaccccgacacgatgaagatcctctccatttcgctcttcacctatccctcggcccagtcgacgacgccgaccgttctctcgcaggcggccgacctctctgactactcgttcctcacccgcggctccgtccaggagggcctcaacttcctctcgcagctgagcgccggcaggacggccgacggccagcggatggccgtcgaggagggcggcaacgtctgtagcgtctacaggaagggcgaccgggctggtgagtagagccgcgtactcgcaagcggggggctggcgtcccatcgccaggttggcggcagctcgggctgacacccgtccccttcccgcccataccagccactgccatcacctcgaccgactacccctcgcgcgtgaccttctcgctcctccagaagctcctcgacgactttacctccgagtcgtggtcgaaggctgtcggcgacaccaagctcgccgaggccgtccgcaagtaccaggacccgaagcaggccgacaccattatgaaggtccagcaggagctcgacgagaccaagatcgtcctggtgcgttgcttagagctctcattttggcttttcgtcgcgtctcgtcaatatctgcctttgcctcgcctcgcctcgcgttgtatcgctcgctcgccgcccgagccgggcagcgggcggcagcagagacggcaacatcatcgcgggcgggaggggtagggtcggaaggctgagttagcctgatcgggcgtcgagcacatcctctcgactctggacgtcttgcgtgctcttgcacggcgccggagttcgacggcagtcgcgcccctcactaggccggctgctggatatgcgggaagggggcggccatcacgcccgtcgcggtcgggctggctcgatgcagggtcgctcgacctggcctgccaggcctcgtagccctgtcatcgccgaacgaagatcgactcggttgaaacaggggagggaggcgacggctggtcgccattgaaaatacctcaggaggccttcggtttcgccatggattcgtgtcctggcagtttgctcgcttctgcagccttggagcccgagctggtcctatagccgcagatgttgcgaacgtgtctgggcgccccgagcggtctccttttccctctctcgatccaaccctcacgaccaaaacctgctcgaattccgcatcttcctgccttgcagcacctgacgcattcttaaccgcacccgccctacagcacaagacgatcgagtcggtccttgagcgtggcgagaagctcgacaacctcgtcgagcgctccaatgcgctctcggctcagagcaaaatgttctacaagacggccaagaagcagaactcgtgctgcgtgtgagtccttcgttgccgcgttggcgcttagattgggctgtcgtgcggcagtggtcgcctgcgagatcctctgcatgagagaggtagactgaccctttgcctgcctccttttcagcatctgctaagaacttgcacccttggtcggagatagtgacgctgggccggattccttgttcgacgtcgcgagaacggtcgagccgcggccgtcctgcggcgttgtctggccgcagaagtcgtctgcatcggccgtcactcgcgttgtttcgagccaacttggctcggcctcgccgcccgcctgcctgctcttttgctccatccacctttgcttgggtcgcacgtcaagagactggcagtttgccggccgtctcctgctccgacctttcatacccttcctctttctctcccgtagctccacatctttcagctctttttcaccggcttgtgctgcttcctcacttctccgaacaacactttagtaatgacccttcctcttgacgagtggctcatcggcacgccgcggcacctcccttcggcccgtcggcgccggtcgatcggtcggtcggtcggtcggcggagaccgagctgccgctcgctcgctccgagagcagcaggcaccgccctgttggatgcccatctcgcccttcccccaaccctccatcttccgcagaactagagcgctcgccttctaagatggtctccgcttcgctcaccaacggccaggtctggacccaatttgccggcagctcgtacgatgccgcgaggccgccttacccgccagggctgctcggtcggctcatcgacgtccaccgcgagaccgcaggcggggtcgacgtcgctcttgaccttgggtgtgggccggtgagtgccagacgcttgctcggagggcgcgattgtgtcgcgcctccagctcacaagaagcgacgggctgaccatcgcctgtcgtctgactcggtcgctgcgcctccgcccttgcgttcttccgtcgcctagggcacaatcacgaggccgctcggcgcgagcttcaggcagatccacggcgtcgacatctcgtgcgtatcccttctcagatcgagaacggaaagctcagaagggcaagctgggttgggcgggcggcttctgggtcgatgctgctgccgtgctgaccctcccccggtccttctcaggcccgagatgtacaaggctgccaagccggtgcccaacgtcgtggtcggtcacgccctagagcttggtagcagagcgctagactgattctctcttgacgtctcgttatccttcgcccttcgtttcccatctcccatcgtcgtgcgcagtatcacacaggctccgcctcggaccttggtttcctcccctcgagctctgtcgacctcgttacggccgcgacgagcgcccactggttcgaccacgctgcctggtggaaggagatgtcgcgcgtcgtccggccctcgggcacggttgccgttttctgttacaacccgggcttcctcctcagcgagcagacgagcggcgtcgtccctccttcgctgaaggagctgatcgacacgacgaggctctacggcggcatcttcacgccgttccggacgcccggaaacggccacacgtttaggctttacgacctcctgcccgggccggaagaggcgagcgatggctgggagccggctcggcgctggcgctggggctggaagggcaaggaggactatggcgccgtcggcgactgggactgggacgtccagccggctgtcgagggaacggccggcgacgagattgagcaggcgatggagagcgagatctcgctcgctgatgtgggtcgccgccccttattatctcctgcccttttgccgggctgacctcctccctcgcccaatccgtgccgcagctcaccctctactttgcctcggtctcgcccatcctcaaataccgcgcggcgctcagccccggcgacccagactggatcaccgataagctcgccgctgtcgtggccgaagccaaggcgcagggtgaggaatggggagccgagacaaagatcagggtccggcgggtcctcgggctcgtcgtctggaagcgcaaggcttaatagagggctcgtgtacttggttcgcctgctgttgttgaacacctgttgtttgcaatgtcgtttccgagagccagccatgccgacagctatcctcagcgcagtgcgccctcagctccagcctctttctcggctggccacgcatgtcagccgctacccgaaccgttggcggcatggccagaatgcgtgataagacggcagggatacatggcagatactgagcgcgagacgtgtctaggcggcggccggggtcggctcagcgaggccggggatcttcgacggcagctccttgagggcggcctgtaaaggacgcatgcagaagagctcggtcagccggcagcacgcatagaggacaggacgagggcgagcacgcacagtgatcttggcggggacggcaccggtgacagtgtcgatcttctggcccttctggaagatcatgaaggtcggcatgttcttaatgccgctgcaggagggcgcacatggagctagtcagcttgctgtacgctcggcctaacgaccgcgaagcggagggacggacacctcggcggcaatctgctcctgctcgtcaatgtcgaccttgtagaagtcgacgttgtcgtaagtcttctcgagctctgcgcgcaaaaggtgtttgtcagcaggccgacgggtctcagcagagcgaggacgccggaccgtaggcacgcactgttgaagtggggagcaatcatcttgctgcgaggtgcgagaggggaggagcgaacgaggtcagcagtcgtactctacaaagcagtcgacctggcgtcgcgactcgggtcagcacttaccatggtccacaccttcgcgagcggagagcaacgagagagtgtcagcctagtatcccttgggcgcgtcctgggcttcggggggtgctgaccaagtggcccctagaatgacgcgaggcggaggagaccgagcaggaggtcagcatggcgctcgcgaagacagcacgtcgcaagccggacgtcgcacgcacagaagtcgacgatgatgggcttctcagagttgatctgttttgcagagagagaagagagtcagctacgagctccagccctagcgtctccgagctgaccggatgggtcggtaagcaagacgccggcggggggccggcagaggaaagctaggccagatttctggcaggaactgggacgcacaagctccttgaactgctcgaaggactcgatggcggcgggcatgatggatcagaggtaggggctgggactggaggagagagatgagggcgaggtggtggtttgggaggaagctcgaccgaccagagcgccagccagcttgacgagactgaggtggctagggttacggttgacgcgagcccagaacgacgccagcgcaacgacccgacccgacctcttgactactaccgcttctcgtactttcttcaaaatgtccgaccagaacaagaaggcgctcgtctggaatatgctcgacttcctcaagacgtcggtcgccgacggcagcgtcaagtcggatgacgtcgaggggctcgaggttgccagtgcgtcgcgacgttggctgctcgcttgtgatcctctcgctcgaggctctgacccctcttgcacccgcgcccagtcgagtgtatcgccgaggctttcggcgttgaccccaacacgcagagcgagcagttctcgatcaagccggccagcctccagtcgatctttgacgtctttctccggacgaagcagggccagaagatgggcaaggtgcggctctcgcaccgggtcgctcgtagcttcatagcattgggctccctctgcatgctctggttccgttgctgacagctcgaccttatgactctccggctgtgctcaggctacgccggctccgtctgccgccgctgccgccgctccggcgcccgctgctccggccgcgctaaccgacgagcagaagaagcaggctgaggcgctcaaggccgagggcaacagcctcatgtgcgtgtgccaatgcagctgttgcgctgagagagcgtgtgctgactcctacttgcgccatctcaggtcggccaagtcctatcaggctgcgatcgacgtgcgtcccagttcggcgcctcatgtgggcccttgtcgctgaccttagacggcccctctcattcagaaatacactgccgccatcaaggttgacggcggcaaccctgtctactattcaaaccgcgcggccgcttacagctcgatgggcaaccacgagggtgcggtcgctgacgcccaggaagccatcaagacgaacccgtccttcatcaagggttactcgcggctcgggtgggtcctttgtcttttcgctgcctgcgctgctggtccacaggaggctgacgctgcctgcttgcttttctccttgccttgcagacacgccctctactcgctcggccgcttccccgaggccgtctcggcgtacgagaaaggcctcaacctcgacccgaccaactcgaactttcgcgactcgctcgccaacgcccgctcgcgcctgcccgaggccgactcggacgaagacgatgacgaggcggctgtctcgtcgcggggcccgtctccgtcggcgcccggcgctgctggcgcgggaggcatgcccgacctcgcgagcatggcctcgatgtttggcggcatgggcggcggcggaggtggcatgcctgacctggcaaccatgatgaagaacccgcagctgatgcagatggcccagtcaatgatggccaacggcgggctcgagaagctcatggcggtgcgcgctcctctctcgctgctcactgggctgcaccaagctgacatctgttctctcttttcgcagaaccccgcgatcaagggcttcgccgacaagatgcaggccggcggcgcgcctccgtcgatggaggagatgatgcagagtgacgagctcaagggcctcgccgcccagttcgggcccaagtaaggcgtcaaaggtggacctatgaccatttacatctatcaggagtctgcctgtttcagcggaggtcttccggctgtgtccaaggccgcctgctaaacttgggtgcaggtcggcgggatgactgctcttgctcgggtctttctgcgcggccccttcttcatcgcatgggcgcacgctctcggtctagaggtcagcaaacgggtaagcagggccagcagcgagagatgggcagatgcgactaagtgagcaggaaactgaggcaggggcagggaagggaactctcgtcgccttgaccttgaagatatggctcccgtgcgagccgcagcaggtgggtgacagtgtatcgtccagaaaggggatattgtggcagagagacaaggagcgtgaggttcgagcataagcgcaatcccgctcgtctaagtcgccgttgtgcgaggcgagagcttagggcgcttcctccagtctgctgacgccttgcgtcgtccggaaggcaagaaacggcccgcgtcgatcttgatcgagcttcgtcggaaaaagcggcgcttgtgcgtgtcgccgactgaagaggaggaacgagctgtcgacgcaggatgaagcgcagtgccgggagaggtcagcaggagtgacgcagagttgatgccgagcgagatgcacccacggaagccgagacggactgaagcttgccagagccaaccttcatggcgaacggtcaagagcgttggttagaggttagggtgtaacgggcatgcaatgacaaaggcgggtctatggacgggaggcgaggagtttgagagttagacgaggggaggagacggaagcagaggaagggagcgcaacttagaaggcgaaaaagcgagcctttcccgccttctccctctctttcccggattcaacatgtgcgttgactcacgccctagcgctcgagacggcccgggcgcgtctcgcagagagccaggccggctgaccctccgccctccgtccactttttctcgcccgccctgcctgccgccgccgccgccacacccggtcgatctcacccgcccttctcgcctcgccactcttacctgctgccacgccggtccttcgatgactccagggttaacttcaccgtcgaccgtgcgtcgctcttgcccttcttttcgctcgatctcgccgcacagagggctgactctgacctgcccttccctccgccgtccgccagagatgcgtgggcttatgggtacgcttctggctctcgctcttccgggctcggggagcttcgactgacagcctgacccgtgccgctgacctctcggccgttagacaagcccaccaacgtccgtcctgccctgcttgccttcgctagctcgtgtgcctgagaccatcctgctgacttggcctccccatcttccctccctccagatccggtccgttcgatcaagcgtcctctcggcaggcctgcagcctcactgacatgctttcttccctccctctcgctgctggattttttagtaacatgtcggtcatcgcccacggtgcgtcccctccacctctggccctcacccgacctttcttttttttttcctctcgtccttcgcccagtcgctgacctctgcctttgcctctttcctccagtcgaccacggaaagtcgaccctttccgactcgcttgtcgccaaggccggtatcattgcttctgcgaaggccggtgacacccggtttatggacacccggtgcgttgcttgttcgccccgaggcctcgtcgaccgagcctctcgctgacctttctttctgcttgccagtgacgacgagaaggagcgtggtatcacgatcaagtcgaccgccatctcgctctacttcgagctccccgaggaggacgtcgagatggtcgcccagaagaccgtcggtgcgtcgcccctcttgagcttctcagtctctcgttgacgacaggctgaccgtcctctcctcctctgcaggcaacaccttcctcatcaacctgattgactcgcccggtcacgtcgacttctcgtccgaggtcaccgccgccctccgtgtcaccgacgggtccgtccccttgtcgcctgcactcgccgttgccgctttgctgaccctcgcacctctccctcttccagcgccctcgtcgttgtcgacaccattgacggtgtctgcgttcagaccgagactgtcctccggcaggccctgacggagcgcatcaagcccgtcgtctgcatcaacaaggttgaccgtgccctgctcgagctccaggtcggcaaggaggagctctaccagaccttctcgcggacgattgagtcggtcaacgtcatcatctcgacctacatggaccccgtcctcggagacgtccaggtctacgccgagaagggcaccgtcgcctttgcttccggcctccacggctgggcgttcaccatcaaccagttcgctggccggtacgccaagaagtttggtgtcaagaaggaggccctcatggcccggctttggggcgacaactacttcaaccccaagaccaagaagtggacgaccaagtcgacgaccgacgacggccaggagctcgagcgtgccttcaacatgttcatcctcgacccgatctacaagatcttcggcgccgtcatggacttcaagaaggagcagattgcgccgatgctcgagaagctcgacgtcaagctgacctcggacgagaaggacctcgacggcaaggccctcctcaaggtcatcatgcgcaagttcctccccgccggtgactgcctgctcgagatggttgtcctcaacctgccctcgccggcgaccgcccagcggtaccgtgtcgagtcgctctatgagggaccgatggacgacgagtgcgccatcgccatccgcgactgcgaccccaacggcccgctcatgctctacgtctccaagatggtcccgacctcggacaagggccgcttctacgccttcggtcgcgtcttctccggaaccgtcaagtcgggccccaaggtccgcatccagggccccaactacgtccctggctccaagtcggacctctttgtcaagtcgatccagcgcaccgtcctcatgatgggccggtccgtcgaggccatcgaggactgcccggccggtaacattatcggtcttgtcggtgtcgaccagttcctgctcaagtcgggcacgctcacgacctcggagacggcccacaacctcaaggtcatgaagttctcggtctcgcccgtcgtccaggtcgccgtcgaggtcaagaacgccaacgaccttcccaagctcgtcgagggtctcaagcggctctccaagtcggacccttgcgtccagacctggatctcggacgacggccagcacatcatcgccggtgccggtgagctccacctcgagatctgccttaaggacctcgaggaggaccacgccggtgtcccgctcaagaagtcggaccccgtcgtcggctaccgcgagaccgtccaggccgagtcgtcgatggtcgccctctccaagtcgcaaaacaagcacaaccggctgtacgtcaaggccgagcccctctcggaggaggtcacgcgcgacatcgaggccggcaagatcaacccccgcgacgacttcaagatccgcgctcgttaccttgccgacgagcacggctgggacgtcaccgacgcccgcaagatttggtgcttcggccccgagggcagcggccccaacctgctcgtcgacgccgccaagggtgtccagtacctgaacgagatcaaggactcgtgcgtcgccgccttccagtgggcgaccaaggagggagtcatgaccgaggagaacatgcgcggcatccgctttaacattctcgacgtcacgctccacaccgacgccatccaccgtggtggaggtcagatcatcccggtctgccgccgtgtctgctacgccgccgtcctgctcgctcagcccggtctccaggagccgatgtactcggtcgagatccagtgccccgacaacgctcagggtggtgtctactcgtgcctcaacgtccgtcgcggccaggtctactcggccgagcagcggcccggtacgcccatgtacacgatgaaggcctacctccccgtcgccgagtcgttcggcttcaacgcctcgctccgcgaggcgaccggcggccaggccttcccccaggccgtctttgaccactggtcgctcatgaacggaaccccgaccgagaagggctccaagctcgagcagctcgccaaggacattcggacccgcaagggcctcaagcccgatgtcccgaccgttgaccagttctgtgcgcggcctttctccccatgaacacacggatcaatcactgacttgaactttccctcgccctgcagacgacaagctttaagctcgacccggaccctgtcgatgtttatgcctctctttccctctctctccttgacgtgcctctgcagacggcgctggggcgtgcagtctgtcgggctgtcgcgttggggtctcagctgtgagcgtgtacgggccagcggcctcggaaggctggcagagcggcgggacgaggagcgccaggacaagagggagcgctgcgcgcgcgcctcgaccgccccccgccgccgcgccgccgtccgacctcgacaccacccatctccttccgcctcttcccccttcactcgctcggccaagtgcaagaggttcatcagccatctcagcggcccctctgacctatgctccttggagctgacggctcccttgctgtgctcccagcattggcggtaaagcagcttgcagctcgccgtcctcccgctcgcgcagcaggcctttgcagctcgtcagccgccttccttccctcttcaagcccgaggccggagacgacacggcctgcaggtcagagcaagtacgtagctaccagcaaaagtctgctggcaattctgggaggcctcgtcgcgtcgcatggggtcggccggcgggcagcctgacactcttgcagacagttcgaacgcgcactctgtcctgctccctcgccgccgcctccctcttttggggtctcctgcacgcatacgatgggctgacaagctacacctggtccagcagtatccaactttcactactctcccgtcaccgctctaagcgacggctttgtatgatcgatggttccctttcctcttccaacaaaaacttgcgggtgaccgtcgtgtgcaagggctcgctgcgtgctcgggcgccatgggacagcggtcgggttctcagtatctgaaggtaccctctgtccagcagtcactgctagcacctcatctgtgtcctctcttttatctagccggccaggagcggcaggccgtgcggagggatgagaggacgtcgagcggcgcaggaggaggtcgcgcgcgcggccggcacgagctgctcgacccctcgacggccatcccagctccagctgagaatacgtctcgccctcgcccgactcgctgctctagcttgtcagtacagatctcctgtgcgtcagatcctcatcttcggttctgacgtgccctgctcgtgctcctcggaccgaagactgagcaacttgcagctcgcccctctcctgctcgcgcagcaacctcccgcctggccgactttctcctcctcggcaaagctctgaccctcgtttcgctccgaacaacgccttgaagaaggtacatggtagttaaccgtgtctctggctcgacctctgagtgatcaatgagctacattgaatcaggcgggcgggtggcagcaacgtaggcttgccgagctcaaccgcgcgcacggtccctttcttctcgccaggctggcgacctgctctcaccctctgctgctggcgggatgcgcacgcaagcagcaaggatctgaatgactgacctggccgcctcttacacccaggttcgacttctgccgcccttccttcggcctgccctcccgctgtcgctcaagtgctcggcccgcccgcgcactcaccaatcctcgcacgatggacgactccagctcgtcagcctcctctcgtgccagcactcctcgttcgccgacgccgactctcccgtcctaactgctgtcgctcttcaccaccgctcctggaaacgacgtcgtcctagtctgggccgacggcgtgcggttcggcttcggcgcgccttcctcaagcgtgtgggccgctttcgcaagcaagggcctgatcctctttggagagactgggccgaatctcctgctcgacgaggaagcgcttgtccttgatcgacgagggcgagggaccgggcgagaccgcccttcgggagctccgagaggagacgggctatagcggcaagagcgagggcgccggcaagactgaggtccgtgagatcagccccgtcagcgtcaacgaccctggcttctgcgcggcctgcatcctggcgagccagatctcgaagtcagggagtacgacaatctcgaacagtgcgtccttcgagtgcttgctagtctgtcgagcttctcttgacctattccttctcctctccgtgtcagactctgcctcgtggcctacaagtgcggcgctgctgcggtcgcccgggcggctctccagcaaaatgcgtcgcggctgctttgggacttccagcccgagatcctcgctctcgcgcccctcatccgcatgccagttctcgtggtgacggcactgcagagatacacgggctatgacagcgggaccatctttgcgtgcgctatcgaggacatgccgtggcggctcgtccgtctgctgcagcccgccgagtggttccgcctcgcactctagcattacgccgagccggagagctggcgcaacacgtgcgaagacgttcgatctgtgagtcgagcgcactaggtcaagagcatgcttgccaagaactgacacgcagcatgcggtgccctcagagctgctattggttcgacgacgccgagcgcgatatccttgcccagcaggaccgccagcaacgagaccggcaggaggagcgcgagacagaggaagacagaaagcgcgacagggctagcaggtgcgtgctcagctgaaggcatccgtgtcgtgatactggctactgaccagccgggatttctcttgccagggccgcaccgaccggcgacggtctgccaaacagcctgcaagcgccggcagttcctaagggcgcgactgagccagctctgcccagtcgcgccaggactcgctcttatcaccccgtcttcaccgatgccgagaacgacgtcgcgatccggacgcctgaaggcacgatcttcggtttccatactcgctggcttgagcggcagtcggcgggcctcctcgaccgcatctcaccaccagctgcgcagtcaatctggacgagcgatgggagccagcgtcggctgccgaggaggtcctgctcatcatccgcccgaccgcgcgcgacccagtcatcaaagctacgagcagatggagcagtaagtcgtggcgcacacccttccatcgctgtgacatcggctgaccttgattttgttccttcgctcaggttctgtctcgccgccgtcggcctcacgctgcagggactcgccataagcgtcctcatgcagacggctttacgcttcatcaagaaacgtgctccagaagtcctcgccctcgcgctaatttgccggtgttcttcgattgccgcccgcgccctcgtccggtttgaccccaagtcgaaccgcagatggggcgaccgctgcgagtgctgcgacctcgaatgtgaacacgatatttttgagatcccttggaggctggtttggaggctggtcaagcggatgtcgtttgccgtcgttgtcaagcttgcccgctgccagacgtcggcccggcggccatatgactaccgctacaatctctggtctgacgtcgcgtgggagctcaagcaggttagtgctggatcaactctcgatgctgtctatgcttgctgctgacgacgacgcttgctttgcagggtgtcgagtggatcgacgacgccgaagctttccttcttgcttttgacgacgacactcgcaagcgccggctatttgccttctatgaggctcgacagccctcatatcgcccgtcctcctcctgagttactctttccgctccacgatcgatcgaagcgactcttgctctgttgttgatcgactgcgaaacgcgcctgcttcgacgactctcgacgtagcggaccgctttgacgccttcgtgtcagcagcctcttgtcgtcctgatctagcattcgctacagccagccgatcgctttccgacatcaggacaagacgaatagccgagcgcatgcatccgttgccgccgctcgtcgtacaacagccaccctcgtcaaccctctgccctttaggcgcgaccgagcgcgcttcatggcctgtagactcatgagatgaagaggacctgtgggagaggtgcaaaatcggctgtcagtccctggctgtcgacttgagggtggcgacggcggacgcacggcgctcggcgtcaggcccagctccttgagcgtcttgccaaactcggaccggtcgtacgtccggttcgggaagcgggttgagatgccgacgctgtcgacagtgaaggcgagcgactcagacgcgagccactcggcgacgtcggtcagggtcgaggtcgagggcagcgtcttggtcagcggcgcaccgccggtcgggagccgggcctgcgacgagacgacagacgcatgtcagcgtctctcctccgaggccaagaagaggtggcggccaacgtacctgcaaccgggtctccgggtagtctttgcccgcgccagctgcgcccgccgccgccgccgctgccggcttggcgacgtttgctgctcgaccagtgctgacgtcgatgacgccgccgtcccggatcgacttctcgagcgccgtccgctcggcccgggccttcttgtcggcttcgatctggagcttgatggcggcgcgtgccttggcatcgtcctccttctctgcagacggcaaggccaaagagagctcattcagcctctcagctggcgcaggcaagacgggaccaggcagacgcacccttcttgcgcgcgagcgcctccttctgagcctccttggccttcatctgctccctgatctcgccttggtcgcggcctgacttgcgtcggagggcctcgtttgccttgttctcctcggcctcctgcttggccttgaccgctcgcttggcggccatgttggcccggagctcctcaagccgctccttcttttcctcctcggtcagcggcttgatctgcgagtcgatccggcgcgtgacagagtgtcagcgcctctgacctcggacgctatgccatgcgcagccaccgctcggccaggaaacccacctcctcggtcgactcggagaacgactggtggccagacttttcagcgtgaaaatttgcaagcgccgtgttcttgaagatcttgctgcactgtaggcgagaagagacaagggagtgcatgtcggtcagtgaggctgcgttgcgcgggcgagtgacgtgtccgttcgctacacgcacctcgtcgcacttaatcgactgctcagaacagcgagcgttgttggatcagcctctgagtccgagatcaagggtagaccgataggtacgcaccttcgcctcggcggctgaatttgcctctagcgccgcctcctcgtcgtcatcgtcggcctcggggatcggcttctcgccgttggcgagcaggtggtccatcgcttgctgctcaggtcggaagctcgagggtcagctcgtcgaaacgaagcagcggagagcccagttgaacgaacctggagaccgccactccgcgtcgccttgagcgcccctagacgttcgtgagccgaggtcgagcgtcagccgtcgagctcctgcgagagagggagctgccagcctggaggcggcccgcgcgcgtacgaccgcggccaaactccagactcacagtcgacccgggcggcctcgaagcccatggcgatgagctggtccttatccgacatggctgtgtagagtagggagcttgaaataggtttgaggccaaggagcaaagggcaagatgggtggtcgaggcgagcgaccgaccgatgctgtcgctcgttgccgccttcccgcgtcaagaggtcgagctcgacctgtgggcctgaccgcgaccctcgcctgcacctgtctcctgctgccagtctactgcaaacctcaagacacgtcagtgagtttgctgagggccatttagagtacatcaacgaaagtgctgaccaccgccgtgaccggctatcggtgctgccggttccatttcatctcgcctcgctcgccggtcagaccccgctgtcgccccttcgttcgaccgcccaaccttaccgttcgcctctcccgccgattcgactgctctccaaacttcgccaaggtgagccgaaagtcttctcgctgctctctgaccctccggattgagcactgactcataaacgcttgcctcctttgatgcgcagcgacaccatgtcgatcgctctctcgaccgaccaggcgcctgtcccggcacctcagcccctcagcaggactcctcgactgcgctcgacaccgacgagccgtcaacacccgttcgcgccgccttcaaggacccgctcaatgaccttatcctcgtcagcagtgacgccaagcgcttcccgtaccgccgggtgatccttgaggcggcgtccatgtcgctcgaggacctcgtcagcgtcggacgggtgactggcgcgcgcaagaagagcaaaggcaaggtcgacatcataacgatggacgatgacgcagaggcgctcgcaggcctcctcatcttcctccatccgcggcacggcaacccgacgatcgaggagacgccgccgagctcgagaagtgcgtgccagccgcttctctcatcgccaggtgcacatcttgacttacgccactcttctagcctctgtgctattgcgtctaagtacgagacccgtgcggcgcttgacgcgatgaccgaacagggccttcggttcctcgacaaggccgtgccaacgctgctcttcattgggatcaagtacgacatcgcgaccgtgacgctcaaggcgctcccatacttcaagccgtgtgggaattcaagtacaagacgcagcaggtgacgccgcccaagtttacgaccggcgacctctcccagcaccagtggcaggcgctcagcccgtctcagacgtttgtcctgcagaagttccaccttggggagatgcgctataagacccgccaccacggctggtacgtcatcgctgaaaaaggtgcgctttaatcgccactctctgacccaaggcactgacgaggagcgctttcttgctcgcgctcagaacccccactactttgagacggagcaggccgccccgtgatagaggagggcacggctgccttcgaaaacgagggcaacgacgtcgtcctccggctcccttcgggtcactgcttcccgttccgtcagttgttccttgagggtgcctctaccgtcttcgaggacatgatgagcattggaggctcaggaaagagacgcgtgaagggctcgacatcatcgagctcgtcgaggaccacaggccctttgcgaccctcctcctcttcctccatccgcgcgaggctgagccgaagctccggaacgcactcgaggccgagccgtacgtcctcgttgtatcgagactgaaccgtcgcgagccgtggctgacgccttagcctttctctgagctcggtgtcaggctcttgaccctcgccgacaggtagcaggcgccgggcgttcaggctgccgtgctcgcgaggctcaaggacaagcgcgaccgggacgcgccgagcgtgctcgccctcggcctcatctacaactcgatggagacggtccggaacgcgctccggcactttgacggcggctggaaatttcctgccggcgtccagatcagggtcaagcccgtctttacccggccgcagtttacgtacgccgcaagacgtgccgccgcacctgtactttcgcatcccgcgcgagacgtggtaccggcttcagccctaccagcaggccatgtttgaccaggacaagacctcggacgctcacggctggggcaggctctctgccatactctcgaaggtgcgcactcagggcgcgttgatcggcccagggctgcccgcgagctgaccccgttgtcgcccgctctcgtttctgctcgcaggagccccactacctccagaagctgtcggcgccttctgatctagccgcctccgattcgaaggcgacgaggcggtcgagccgcgcgtcaggagctctgcccgctcctgtctcctgaccgcggttcgctcctgtactgtgcgtgtcggtcctcctgccgactcgcctcgccgtcctgacgaccgatctcttgcctttcacagctctcaacgaccgtcacgacctcggctttgtcctcctacaccatttcttatgacttcctctgctctgcgaccggtgctacttcgagcacaggttaggctcgtccggcagagatcatcacagccgtacgaccgcatcctctccctcgccaaacttgtcaacccaggctttgatgccgccggtcaggatgacggcctcgctcgtcgtcagccgagcctcgtcgagcgcgtcctggtaccagcctggtcgggtgaacgagcgcagacgggtcagatcgtgctcgatggcgatgcgaggaagcagacggaccagcgcagcgcggaccgcgtccgtttgaggacgagcagtggaagacgaccttcgggtatctggcggacgtcggaagcggggctggtcagccaacgcgtcgagagcagcctctgacgaacgccaacgcaccgtgagagcatcggcaggagcgcaggcagcgtcgcatggaatgtctgtgcaggcagattgaccgcgcccttgatgaggtagtccatcggcggctgggtcgagcgttgtgcgcagggcgagatgtcagcccgcggagaggtgctaccagcgagctgccctgccctgcacgcacctcgatgtctgcccgccggacgtcgacgacgagcacctgcggctgctttgacccctcttctagcgcttggagcgccgtccggaggccgtcgaccgacatgccagccggcaccgctttgggcgccggcaggtgagcgaaccaggacggcggcttggtcgcgaggttggcggcggcggcggccgcgccggcggtggtcgacatgacgcgggtgagctggcggaggtgaagaagtgacagggcggacgagtgagagctgtcgcgagcgggagaggagcaggtgagcagaggaagagggagggtaaccgtcggacgggcaaagcgacgggcgctccggcacgcacgtgttgctaccgacagcccaacgcttccagcgtcgctgcttcccttccctcccctgctcgctcgaaaaggatcgagaggcggccaagcaccgcctccgaagcttcctttcctggaggtcccgcatgttgcgttgcctggcgcgctggcaaggacgctctgcgctgcctgcttcgatgcttaaatggcggagaccccggctccgaagccgcgcgggaccaagccaaaagaggtcgggcgccgaggccagtcaagggaggtcgggggagcttagaaggtttcttcgcttcgtcgcttacccgactctcccacctccctccttctctgcacacccataccagcagagtctactcgctgccactccgcccacttcgacgcccgcctttcgtcgaacgctaccgcctcaaagcccgccccagacaagctcgcctcgcgagctcgcaccctcgacctgtcactcctcccccggctgtcactcccgatgccggctaaccctctaaggactttgcaagagattcggcatgccgaaggtcgcggtgcgacgcctgccgagaaggccatcaacctcgagctccatctgcccgaggatgtcaaggccgagaagccgccgcggggctcgtcggccgacgacggtgaccaccggacgctcgcgagcgcaaaggccagcaagcacgaggcggagtcgccgactacgaatcagtcgtacggcctcgccagcgaggaccgctcggagctcgtggccgaccttgacaagtcgggaggtgagtccttggcctgcttggatgtcgatacctgggctggcagcggctgacccttgctcgctcccgcgcgcaggcctctcgctcctccgtggcctgagcttcctcgaccgcttcctcgccttctttgtcctcctcgccatgatcctcggcgtcgtcatcggtacgtggcgctggtctatccaaagcgaggacccgcagctgacccgaaatcgggcctcgacaggcaagttcgcgcccaacgttgacatcgtcctcaaacaggcaaccttcgacggcgtgtcgatccgtgcgtcctccaaccccattgacacatgaaatcgacactttactgatatgcgacacttcctgcagcgatcgtcatcggcctactcgtcatgatgtggccgctgctcaccaaaggtccgttgtcttgcgtccttatcgacgcaaggtcgtcgtcgctgaccctagagtcctgtccactctcatttgcagtccagtacgagcggatgccgatgatccttggctcgagtcacgtctaccgccagattgtcatctcgctcttcctcaactggatcgtcggccctttcgtgcgtcccgttgacgccaactcgcgcaggccacaactgacttactcgcccttccccgcagctcatgctcgccttggcgtgggcaacgctgcctgatctgccgacataccggacaggtgtcatcatcgtcggcatcgcgcgctgcatcgctatggtccgtcctgcctcgtcttgcctccctcaccgcaagtcctgaaccctgcgcgctcccccaggtcatgatctggacccagctcgcgcacggcgacattgactactgtgcgatcctcgtcattatcaactcggtcctccagatcatcctctttgcgccgatgagcgtcttctttgtcaacgtcatcagcggcgagacggccgagagcggtggcgtccggctcgagtacggcaagacggcgatcgctgttctgattgtgcgtgcctcttcctgcgatagtcgaatgcgcctctacggatcctgaccgatgcgcgctcctccagtacctcggcatcccgctcgtcgcgggcatcatcacccgggcgatcggcctctggtcgctcggcaagcgtcgcttcgaggcctatttcttgccctacttcggcccgctcgccctcattggcctgctgtatacgtacgtacccgtcgccggacctgaatctgtcgcctgctgttgctgatcgtcagcccctacggatgcgcagcatcatcctcatttttgcctcgcaggcgacccggatcctcgacaacatcggccccgtcttccggacgatggtcccgatgtgcctctactttgccgtgatgtggactggtgcgtggcggaccttgctttcaacccagagttggtgctgatggaacccttgcttgcaggaaccctcatcctcttctggcggctctcgctccgggccggcggccacgcaaagcacggctacaagatggccgtcacccaagccttcaccggcgccggcagcaactttgagctcgcgatcgccatcaccatcgccatctttggcgccaacagcgaccaggcgctcgcggcgacgattggacctttggtcgaggtgccggtcttgctggcgcttacgtgggtcgcgctctaccttgagaagcggctcaactggggcacgcccgagcctcggaatgacgaggaggcgctcgctcgctgagagccgacgcttctaacaacatataatagagtctatgccatgcatcctgtttttttttttttttttctttccttttttaatcctcgcaaacggcagggggaggccggggcgccgtcgcgtgcgctgtaagtcgaccgcccggcacatggacgtttctgccgccttctctgccggtaagcttcctcggcagacttgcaggcgcagagctctcagacctgggctacgagacggtcaggagcacaggctgtcgacgatgagaggggcttaagagaggaaaagtcggcttgtgacgcatcctcaattgactggcaccccttctcattcctcacggttgctaaagcgcggctgctgaacgctgacgggctcagagtcaagaagggaggtggatggatcatacaacaggcaattactcgtcgtccatcgcctcctcctcgtcgcccgagacgtcctcgccctggacgttgtagaacgagagcgagtaggtcgtcttgtcggtcgcgacgacccggacaaagtcgcggagcgtcgacttcttcaagtagcgcttcgtgagaaacttgaggtagcgcttcgagatgacggcagtcgcagtcaccttgatcttagagtctagaggggcggcaaaaggcaggcatgtcagcttcggcagattcaggaggaacagaaaggggagaaagggaagaaggggaggagggcatcataggttcgtttggtgtgaaatcattatcaccagtgccttcccgccaagcgcccgaacgaccgtcggccaaccccgaaccccgacctctcctcgcccgccactctgccccgccgctcgcccagagtggagaagacctctcgacccgccctctaccatcccgagggatggacaggcggggaaagggctccccctctcggacgagacagcaggaccgagggagacgggtccggatgaggagggcgaagagcgaccgcaggccgctcgttaacggcgctcgacgggggtgagccgtgagagtggtgcatgatacagtataatcctttggaagaaggtgggtcgaagaagggagtgagagcaggagatgacgtaccgacacgcttgatctcgacgagcgagccgagctgacccggcttgccgtcgaccttcatgttgtcgtgcaggtacttctcaaagccggcaacgtcaaagatgcggtcctcggccggcttggtgcagtcgatcgtgtagacattctgggcagccttcttgccgccggcggcagagggcttggtgagcttgggagcagcaatcttgggctgcaggcgggagacggaagtcagcgacggcaaccgtgaggaaagcagacggacagaacgcaccattttcggtcgatatggtaagcttagaagggtagtgcagggactctactgggtaatatcttcagcaagagtggtgcgctgagggagggaggggccgcccggaggcggagcaggtcagcgtcggtccggcttgcagtggcagcggttggaagggcgagcgagcaggtccaccgagtcgtgcgcttgacgagcgtcggcagaccctgagcccagctctgagagaagagtcggacgcactcgttcgtggatggcggtcggaggtcgggtcgaggcaagcaggcgagatcctttgaacgcgcgcgcgcggcggccaaaatcctgccggagtctgaaacttttggcggggcagggcggacgccgcgccactgcagcgcagaggtctgaatccaggccagacgagagagaagctcgcctccgacccgacttcgtccccggcactctctcctttccttcagcagcagttcttcccgagaaatggcgtctacctccatgccggtcgtcccgatgactgtcgcccaggcccaggttgccggcgactaccagatcaagtctgaggcggcgatgccggtcctcggtgcgtcctcctctccccgacctcgccctcgtcactcgagacctcctgctcgggctggcctgtcctgggctgcacgatcattcaggcctctacagcactgacgccgctgttgatgctcttcaccaaccttgcagacacctcgcagtggcccctcctgctgaagaactacgacaagctgctcgtccgctcgtcgcacttcacgcctatccccgtcgtgagtccttgtcggcttgaggctaggagctgcgagcgccgggggtcgccaagggtattaagctagtcaagggagctgcttgaaggttgcgccaggcaggatggacgcacgagcagctcgctcgcagcagctatgaggcgcaactggaaacggagcttcgcgggagctgaccctttgcgacgtcgccttctacgagcccagggatgcagcccgctcaagcgtgacctggcgacctacatcaagtcgggcgtcatcaacctcgacaagccgtcgaacccgtcgtcgcacgaggttgtcgcttggctccggcggatcctccgggtcgagaagacgggccactctggcacgctcgaccccaaggtcaccggctgcctgattgtctgcatcgaccgggcgacgcggctcgtcaagtcgcagcagtcggccggaaaggagtatgtcgccgtcctccggctgcatgcgccgctcgagaacgagaaggtcctccctcgcgcgctcgagacgctcaccggcgccctgttccagcggccgccgctcatctcggccgtcaagcgccagctccggatccggaccatttactcgtcgacgctcatcgagtttgacaatgcccgcggcctcgccgtcttccacgtctcgtgcgaggccgggacctacatccggacgctctgcgtccacctcggcctcctcctcggcgtcggcggccacatgcaggagcttcggcgcgttcggtccggtgcgatgagcgagaacgacgacgtcgtcagcatgcacgatgttctcgacgcccaatgggtttacgacaacacgcgcgacgagtcgtacctccggcgggtcgtccggccgctcgagtcgctcctgaccggccacaagcggctcgtcgtcaaggactcggccgtcaatgccatctgctacggcgccaagctcatgatccccggtctcctccgctacgaggccgatatcgaggtcaacgaggaggtcgtctttatgacgaccaagggcgaggccatcgccctcggcattgccctcatgtcgaccgtcgacctcgcttcgtgcgaccacggcgtcgtcgccaaggtcaagcggtgcatcatggagcgcgacacctacccccggcgatggggtgcgtccactttcgcctctgtccgctccgaagcgctctccgctgatgttatcgcttgctcttttttgaaggcatgggccccaaggctcaggagaagaagaagtgcgttatgtctaagccctgcacgtccacccgcccgtcgcgcgaccgctgacggcaccctccgcctggctccctgccacctccaggatggtcaaggccggcacgctcgacaagcacggccgcaagattgagggcgtgacgccggcggcctgggacaagtcctacgtcgactactcggcccagggcgaggaggtccggggcgagcttatcgccgtcagtcccccatcgaccacaaggtctcatgagtgagctctagactgaccctgccctctaccgttcccttatcagacgcagccgtcggcgccggcgccggccgctgaggagaagatggaggtcgacgcccccgcagccgctgcgcctgctgcggaggccccggtggccgaggagaagaaggagacgaaggaggagaaggcggcgcgcaaggcggccaaggccgagaaaaagcggagccgcgaaggagagggcgaggacgtgcgtcgaccttcttgctgctcattcccctgccagacctaaagctgaccatgctgctcctttcgccccctcagaccccgaagaaggagaagaagagcaagaagagcaagacggactagatccgtgccgtctcgccgccccttgcttcgactttttctgtctcctatcgctttgttctacttcctctgccgcatctttcatgagcccccttcacgccctgcttctgttgcccgggtttccgccaggggctggtcgtgcgggctattcgaggtgcagatggaggctcgcttcagacaagtgccccccggcgatgcgtacgccgcccccagcgaccggctttcgccgccgacgcgctgactgcgagctcgagatctcgtccgtctctcaccctctcccatcatccacctcctgctccggtctcgtgacgtcttgcttgcacgctgacagctcttgcgcagctgctgcccacgttctgtctcgcggcggcactgcttcgccccggcaagcagcgggtcgcggcagtacgagccaaggccgacgcgcttcgcgagctgcgagctgcgagccgcaagcagccttcgctccttgcccagccagccagcacctctgatctcctcgaggttccctctcgagctcgctcggacgagaacagctgctgtcgggtctggacgggcaaacggcgatctcctggtttgggtcgacgacagcgggcgcgctagtcgacttgagctgacgctgttggtcgagcgcagggctagatgcgtcggcggcctgccagcgacggggcttcgcgcaagtgcactcgtcgcaggccgcctccagaagggagtctcgagcgcaacatcgaggctggattgggcctctgcacgggtagagtgggtcggggtcgcgcgtgtgctgactacccgggcgaccggccgtctgcgcacgtattctcgccgacgaggccccagcaatgccctggggtgattgcaaccctggccaggtaacgacgggacgactgggcggacctgcttgtcttcggcgagagcctctccccgtgcgcgcgattgagagaccgtcggccctagcaccgagaggaacgtcactcgcgtcgccccacaagaaaggagcctgacggcttgaccaaaggcgagcatccgatgccgacggcagtgtgagtctgtaagcgtttctggcgagcggaccggcggtggagtccggtttgaagcctcactggcgacgagagacatctgagcggtcagacgagcggtcgtttaacgttgcctactactcgacataagacctgaacgtccccctgccctgcgatctgattgtacacttgtactcgttgtctcagcgcactggccttgtcagtgctcgtctttgttcttccgtccgggcgccggaacagagatgagaacgccatgtccaaatgagacgagcagctgaggccatgactgagcgtgcgagtcgataagggacttggctcagttctcgactggcctgcaaggacctgtgcctctggatgacaatctttcacccttccgatcttacttcacggtcggtttggccggaggctgcaaaatcgaaaggtccaatgtttggttatttggaccccacacgaccccgacgcgcgcgggcggccaagttacgtaagcttaatggcttagcaggccgccccgcagtgcgactgcttctggcgcgggcgggcgctggctgctccgcctgcgcggctcgcacctgcgcgccgggccgactcgacctcgctcgctcgctctctcgccttcgccctccgaccaagcaagccgccagcaaggtcagctcgtcggatcgcaccctagaagaggcacaggacagacgactgacaccctgtccgtcttctttgcctctctcttccggtcccgctcgtccaatttcgacactcgtccgcccgttgctgccgtcgctactgctgctcgccgcctccgtcgtgtgctgctgctctcgatctcgacctcaacctcggacctccgccttcctctcgtccgaccgaaacctgctcttcctcccggcgcacgccttccgcctgctcgcgctttcgccaccccacagacctctagacctcgtcctctagagacctctcactcgcttcaacgaccatgtccaccctcctcgccctccccgcggatgtcgctaagaccaactccgacggtgccgtccggctcttcggaaagtgggagaccaacgagtgagtttcccttaaccgcgcgacgtgtaacggaggggcgagaggcaggcggggcacggcgcggagtcgagcatcagccggcacagcacgagctcagcagcgggtcgcccagggctctgcgcttgaggctgcccgcttggccagcgcctagcgttgctcgtgctggtcgctcgtcctgcagcaggtgtccggagcggggacgggcaggctgcgatggcctggacggagccgtcatgctggacgaatcgacgactgacctgcccttcccctcgcgcccctcctccagcattgaggtcaaggacatctccctgaccgactacatccaggtccgccacgccgtctacgtgccccacacggccggccgctacgccaagaagcagttcgccaagggccgcatgcccatcgtcgagcgcctcgtcaactcgctcatgatgaagggccgcaacaacggcaagaagctgatggccgtccggatcgtcgctcacgcgttcgagatcgttcacctcctcaccgacctcaacccgatccaggtccttgttgacgccatcgtcaacactggcccccgggaggactcgacccgcatcggctcggccggcaccgtccgtcgccaggctgtcgacgtctcgcccctccggcgcgttaaccaggccgtcagcctgctgacgatcggcacccgcgagtcggccttccgcaacatcaagtcgatctccgagtgcctcgccgacgagctcatcaacgccgccaaaggatcgtccaactcgtacgccatcaagaagaaggtgcgccagcgtttccctccctttggtagcggcctcggacttcctggcggctcgagaggagcgcgagggagagaagggttgcttccggccgttcctggacagctgctgacgccaggacacgtccaaaattttgccaggacgagcttgagcgtgtcgcgaagtcgaaccgctaattgtccctgttcgatcggccggaaaagcccaaaacgcttccccttctctatcgaccgggctctgggccaggcctggtcggcccctcgtgtatcggtctttgctggtcgatgcgatgcttgtctctcacggaacgagtcttgggccagacggacgtgttggggctgccgacgcgcggccttgccatcggccttgcgcctgccactgctttcttcgctgatcattgtctactgactcgaggcgactggcatcgtggcgtgcagcacctagctgacccgccgccgatagggtggtgtgtatctgtcctgactatcgtgctggtcgtcgtctggactattcctttgactcggaccctctccaccgctgcaacaggtcgtgatggtcctttttggacttggacttggactttgagagcgtgacggaaacgacacggagagcaacggcgcgccagacgcgaccctcatcctcccttccccgcctccctttcctgctttccggcggccctctgactcgctggcgcgctctgtttactcaccgccatttatctcccggaaattcaagtccatcgtcgctgctttcctttctatctcgctcacttccctcttgctctccagtctcgcctcattgcgaccagtcccatctatcctcccgctcaatcccaccggatggaacggccaccatccccactgtctgtctcaatgtacaggatgctcaattctgatggaagggtgcatcgggagtggagttggcggggcaagtacgcatcaaagggggcgagcggcgcagcaggcccagttggcggaagaggctagtactcgccagcaacgttgacgaccgtctcccctcgagtctaattcgccagactctcattcaagccgcctattcttgggctcgtctcgtgcctcggtcgacaagctcgaagcctggccagcactcggtcgctcggtcgctccctcgaggcgcccaacgccagccagcccttcacccgccactcggtcgaccaacggagcttgagcgtgatgccaagagcagttgagcgtagaggcattaaggatacagtccctgcgcgacgagcgagcgcgagcggggggggttagagacgagagggtagagcctgaggggtatcgggaagggtgttcaggcaggagggaagagaagaagcgaggagcgaagggcaagatcgagattagggagggcggcaaagagatcgaggaagccggtcgtcgggcaggcagacggaagccgccaggttggcggttgcggtcgagagcttttgaagggagagaggcagaggacagtggtacgcgcaacagctctaggcggcgacggcggtgccctcctcgcgggccttcttctcctttgcggcgagcgcgagggcgtcgaggtcctcgaccgtctggccgcggtcgttccgccagcggccgtccttcgggtcgacgaggccgtagagatgcgtgttctggttgtgggcgagcacctggatccagtcggcgcagattgtctgcgagtcgatcaggacgttggtctcttgcgagtggtaccacgactgggtgtcttggttgccgttgccgcacatgccgacggcgtcgtcaaagatggcgagcttaacgtggcaattccgttgtttgatggcggcattgagcggccggctctggtccttgccgacgtaccagaaaactttcaggaagcgctcggcctttgcggcacggagcgttgcgtacatccggaccgtcacttcttcgttggtcccgccctggaaggggatcgactcgcccttgtcgttgaagccgagaccgacgtagaggacgacctcgatcccacgcttgcacgcatcgatcgccgcgtcgacgaccggcctggcgttgaacgtcggcgtctggataaagactttgcgcttggcgcaccggaaaccggcgagccaggccgcgttctgcggcgttcggagatcctggtggccgggcgttccgcgcgggccgcggttgacgagcgccatggggaccggccggtgcggggcgtggaaaatgtgcggcgtgaagtcgtcgattgcgtccgagtcttcgaccgtcggcagcggctcggacaagacgccggcgtctgcgcaaggagagaggggagggacagcctgtcagaaagtgactgcgcagagacacgaagaggacgcggtcgaagccgccactcactcagcttttcgctcatgcgttcgagccggctcaggagcagcttgtcgccggcacccatcgccgtcttggcgcccgtgttgagcgggacgccggccgagaggagcagcgcctcggtccgtctccgggcctcctcgcgcgtcaagacgggcgactcgccatctgcgaggagctcgtccggctcggcgacgagcagttggacgtgcctactcggcgggccgaccggcggtgccatcgtcgtcgctgtcgagctcgacgcgccctcggctgaggctgacggcagcgggacgggctgagcgagcggcgacgggatcggcggcagcggagcggcaaggacgtggccctgatcgttcagcttaacctcggcaagactcgactcgagccgccggtggaactcggccgcggcggcgtcgctcgccgggtcgttgccttcgccggcattcgggaggggcgtcaaggggccgtcggcctgagagggcgtcggcgcctgagacgagcggagcgaggctcggtcgtcgtcgttgtcggttggcggcaggttggcgtgctgaaccggaggcgaagcgacgagcttcgacgtcccgccaaagtcggcccaggtcgtcccgcgcttgcctggagaaggtgggcaagggaagaacagtcagcggcggcgccaggaacgaagcttggagcttactgacgttcgcgggagttgcgccggctcatgcttctgctcgccggtcgactccggtccgtcgcattcgtcacgacgtcgaccatgccctcaaaccagccgctctgggtccggaccggctgctccctcggcggcgcctccatcccctgctcgatcatcgtccgcatcaggttgcgcatccgcccgcgctcgggcatgagcgcattcttctgggcctcgtcagagtcgtactctgtccggtcgcggaggagccggaggagcttgcgcgtcgcctcggcggcgccgacgagcgggatcgcctggagccagacattcttctcctggaacgtgaagtcgtcgggcccgaggagtggcgcaggcaacttgaggagcgggagggctgggacgagcggggccgagaaggagatgagggccgtgtcgtagagcgactggacgacctcgccctcgaggtggaccatcatctcgagatttggtcggtcctgaatattgttcgagcagaggagcgccgctttccggtcgacgacgaggaatttggcgtgaaaggtcccgagcaggagccggtggtagttgagcacctggagcgagagattggggatctcggactcctttgggaggtcgatcgcaggccacatgtcgggtgggacgggtgagtgcgggtggaggaggtgccggagcgtgccgcggtcatagacgagcttgacgacgaccttcctcggcccgcccgttggcttgggtcggccggcccgctcagcctcggcgacggccgcggcgtgctctttgcccagcctgtcgctcagcgcaatgaacgcatcgctgatggtccgctgcgagtttgagatctgccagtagttggtaaagaggaggacctcgtgctctgccccgcggatgagcgtcgcgtggtgctcgatgatgtccgggatgagcgagatgaccgtcatgggcacggtgccggtcgtgccgagcagcgagggcgagcagacgccgatccgagggttgtggttgagcgtctggaggaccgagccgtagatctggcgggcgcgccagagaggcaacgtcagcgactgggcagagagagggagggacaagagggcgactccggcagtcgagccctcggccccctaaagccgtccagagcaggcgacctttgcctgctccatctcaagcctggccggagtggctgccgcagccctccttggagaagcctgggttggccatgttggcgggtgaagctccggcttccggggctctcggcgggcggcaacgctgcccgtacaagccgggtcccagcttgggcggaggacgacgaccacgccgttttcgcggattggcaccatttcgctcctgatcaaggacgccgttcgcgctcttccaggctgggcaggctcgccggaggaacgctcgacgagcgccggttgggcgagggagggcgcggacgtcatgcccgcagcacgaacgagggcgccaagcctctcctctctctgctcctgcccacaccgtctccctctggccttccatgtccagcaggaccgatctccttcatccagcccatccagccgcccacaaagcgcgagagtgaaaagcagccggacgagaggacgtacgtcgagaaagagatccgtcggccggacgtcggccttgacccagctcccgcaaagcgcgaccgcctcgcgctccttcatcttggccacctcgctccgagccgcgcgccggcgctcgacggctgagccgccgtccgagacgagcttccagaagaggcgtttggggaaggcgtgtttggggaggtaggtgcgcgaggcgcggagggagccgggcgaggaggaggaggaggaggcgaggaggtcggttaaggacggggtgggggtggaagcgtgtgaagcgagggcaaggacggccgctgagggctcgatcggcggcgacatggcgggcggccgcgaggagggtcgtgagggtgctggctggctggtcggagggaagggacgcacgtcgctcctgccgggcggacgacgctcttccctctcgcccacgcgcgcgcggctggcgggccggctgcttccggcgaaaccacagtgagtgacgccgagcccctttctcgtgctcagcggcgtcgagcgagcaaaggggagaacgcgtcatgtgtctgtcctcccgcagctatgggcagaaggaaacaaggaagggagaaagggtccggacgaggtcgttggtcggaaatgcagggctgtatgcggtgtgtgagaggggcaaggggggggggatggcttgtggtgagagtcttctattgtcgacgcgcgcaacaaagcccctttgatttgctgccgcgcggtacctcgcttttgacctcgcacccattcacaagcagaccctgtcatatccctgagccaaagctcacggatacgaggggcaagccggcatgaagattgaggaggaaaggaagcgcttttacacgggtacgaggaggggagggcgacaagagctacacgaagaagggaggaaagggaggatgaaaagctagaagggcgggtacaaatgtatggacgggaggaagggaaaggccggcatctagtggtttgaggcagcgaggagcaagacaagacgcctatgggcattctcttaggaaggaagtaaggaacagaagcaggcgattgttcggcggggtgacgggcgggattagaaaacgaggatggcgtgcgggaggaacgaggggtggatgcaagagaagaggaaaggtgttgaggggaggtcggttctacgaccgcaggctggtcggccggctggccgccgcccagttgagcggtgaactgtcgaaggacccggtgggcgtgttgatctgctgaggggtcttttggccctcagcttcgcgcaggcggtcgacgtccgtctccgagttgaatgggctcttggcgccgccgatgtaaggacgcgtgctgccgctgttggaccggttcgtcggcgtcgagtagcccgagctgttgacggcgatgtcgtgcgaaggcgagataaaggagcccatcgacgactggctttgcatgctcgactggctttgctccgagaccgagtcgggcccggtgtagaagcagtactggttgacaaactcgctgtacgaggccgagttgagagctgggctggcagcgccgccaaagctggagctagaggtcgggaagatgcggccgaccgggggcgacattggcgactcggccggcgtgctcgaggcggtcagagcgggcgtcgcgccggacgactcggacgagagggacgagattgagtgggccgactcggacgacggcgacgacggaacgccgtccatcgagaacgacgtgtacaaaggcgtcgacgacgaggtccggccggacgagtaggtcgagccgacggtgctgccgatcgatgaggtcgtcgtcgcgccgaagtcgggcgcgagttcggtcgtgccagcagcgccgaacgtcggggccatgctgaacggaggcgacgctgacgaggccgagttgaagtactcgatccgcgaggacgaacccgtgacgagcggagacgagtgggcgttggcaaaggcgtcctggaacgagccctcgttgaagccgggcgaaaacatgggctcaaacgtcttgagcggctggtaggcgtccggctggaccggcacgacccgggtgctgaaggcgagcgtctcgctgtcgcgcggcgacttctcaccgaggcccttccagtcgctgaacgacgacaagccggcacttgggaggccgtcgacgccgaacgacgggcgcgcggctgaggtcgatggctgctgttgctgctgctgggtagccatcgaagccgcgctcgcgccggtcggaagcgagccagcggcgtcgaaccggaggccgtagctgccggccgcgtagccgggcgatggcggcaagggcgacgagggagtgccgggcaaatcgaggttggcgttgccgccgaggggcgagccgttccagccggtgccgacgctcgcgctcctctgagcagcgtcccgctcgcgggccgggctcgccttgaagctcgccgagccaaagctgtagcgggccgagagggccgggccgttgccggtgcgcgggctcaggagcgcgttggcggtcgacgcccggtcggctgcggccgcgagcgcgaccttggtgacgacgggcgagatgcggtatccgggcgagcgtggaacctcgtcgtcatcggggtcgtcgtcaagcgccagacggccgaggtgagccttgagactggggaggggagcacaagggcggcgacggtcagggaggccctcatgacaggacactgccgagagaatagaccgcttactctgccatgcggtcggcactcgcgccgccgttggccgcgctccggtccgaccactcggtcccgcggcggctgcccttgcggtcgcggatgtcggccgccttgaggccctttgccttacggaactcaaccttgtagttttgaccgccgttcgagtcccagacgtcgtctcggccctcgggcgtgtaccgaacgcacatgaagagcgtcttctcctcgatccgcgacatgaggtcggagagcttgatgaggaagacaaagcggtcgaaggtgccgcccttgatcgactcgtggtaggacgccgtcgtctcggacgtcgtcgaccagccgtcaaacgtgaaacggatgacgacgcgcttgctgaacgtcaggttgcggacgtggacgacgccgcgcaggtggcgcgaatcctcagtcaaggcaatattgttgatgtagacgtccgagtcgtgcggtacttgggtcgggaagttgggcagcctgagctcgggaaaggacgcggtcaacgaagaggcagagaggcgagtctgcgagcggcctgcgtacttgatcatcaggctgcggcgcgtcatctcctcctcgtcgctcgtgctcgggaacgggtagccatcgctgcctcccggcccaccgttctcgtcgtcgggcgatccaccgcggctgacggccgtcggccgctgctcggaacggaacaggcgaacgcgctaagaggagcaggtcaatgggaaggtcagcaaagtggcgcgccgagacctgcgagcgaagaggcgtccgcacctcaagctgcgtgtcaaaatggacgatcttggggaacgatggcgtcgccgggagcgagcgcgagccgacaaacgaagacgagccggccgaggacgcagccgaggcggccgaggcgttgctcgcggccgagagcgggttggtgtcgtaagcggccgtcagcgtcatcttgagcgccggccggacgagctcgcccgacttcttgcggatcatcggcgacttggcgccgctgctcatcgtgtacggcgccggcttgccgtcgctgacaaacgtcttcgtcgcatggtcgtactttggccggccgagaatgtcaagattgagccggagggccgagatggcctcggactcggcgatgggcgagccaccgcccgaggcgatgctcgcggccgtcatggacgcgagcgtcggccggccgctagcctcgcggcgcgagttgaacgaattggcgcccggccgccggagctgctgcttggtcagcgccttggctgggttggaagaaccgtcggaggacgggctcgcgggcgaggacgggccggccgtcgggcgagggaggggcaagagaggcgacgagacgggcggcgccgacggtgaccggaccggcgagggcgacgtcgtctcgaatcgcgggagcgacgccggctcgagcgttgtcgtcgccgtgatgatcgtcgtcgggacacgcgccttcacgtcttcctgcgaggcccgccgcgagtgggccgggctcatcgtcgggctcgcgcccgggctgacacgcttgcgccgaggcggccggacgtcctgccctcccgagccggacgagccggtcgactggccagccgtgtaaaacgaggtcgacgcgaaccgcgccggcggccggcggggcgaggcgtgcgccgacgacgcaggcgagacgccgaccggaggcgaagtcgagccgggcgagcgagtcgaaggggagcgtgtcgtcgacggctcaaccgccgcctcaacgacgaccgccgccggaatgtcgccggcgaaatggaccggcttcggagccgccaccgacggtgccatctttgcagcctcctgcgccggtgcgggcgaggtcgtatcgctgtgcgacgatctaaggcatcgcagagagtaaggcaggttggtcagcgtcgggaggcggctcaaaacgaagaaggacggccacgcaccctgaccggctcatctttgagctctcaacactcgcgaattgagcctcggagaccggtgccgaccgccttgcgccgccgccgttgagcgccccattggccggactgtggtggacgaccttgatcggcggcggggcaggggcagtcatcgtcgtcgccgaagagctcgagccgaagggcatgccacgaggagaaagggctgggttgcgaaggaaggagggagggcggggctgagaaaggtcgggttttgagggcgcgtcgcaagaagagtctgacgaggacaaaggagatgaggacgtgtgtggtcagtccgccgacgtgtctcaagcgcgcgcgcgctcggaggggatggtggtcggagaggagagaaagaagacgagcgaggcgcgaagaagtgtgggcagcgcggtcctctcctccggcccgaagggatgggcggcggcgcgctatgacagagttgcgctcgctctgtcctagagctggcccggcgtccgacggcgtgggtcgggtcggtcccccgctgagggcaggcggagagaggaggagacgagcggcttgctgcctgagccctttgtcggctcgcgcctcccaacatcctccccagcgcgcgaagcaggagccgcgcccgggcccgaaggagcgaggaagagagtgcgagctgctccctcctccagctcctgcccttcgagagcacagagagagaaaggaggtcggctggctagtgtctgcttcccttcatgcgcgcgcgcgccgtgccccgggctggggcggcggggcaggagcgagagagggcggagagagcgagcaggaggacgtgccgggactcacggctttccggctcggaggaagaaaaaaacagagagggagagacgatggcagcggccaggaagcacgagagagggcggcgggagagagggcgacgagacgacggtcgacgggtgaggtcgaggagaggtcgaggaggaagcttctgccctggctgctcgtggttggtccctgcagtgggcgagaggaaagaggcggggcaacggcgcggggcacggggagtaccagaggaggccagccacagaggccgctcggcaagactgacagccgggccacgctcagccatgacgaccggctggcaaagaatgaaggcattgacatcatggtgcaggcgagggctttgctaggaaagaaggaaggtggacgaggtgtctgctgctgctgttgctgccctttgcgacgctcctccttcctgcgctcagccttgcacagcagaacgggccgcagcgcctggcgcccgccgagcctctctcgctgcccgggccacgcggagagcttccgaacccgacctttggtcgcctttttcggtggctggcccggcccggctggcgggccagctggcctcggccagcaagccgcatcgactccctttgagccagccaggcgctgggcccgcggcgaagctgaagcgcggcagggtcagacggagttcttgtgcaggtgaaaggcagtgtgaggcagcaggcagagaagaggcatgtcgaaggcagcaaggcagcttctcgcttgtcctttgcaagtacctccttagcgtcgtcgttgtcgtcggtcgcgaccgcagatcttcgcttgccacttcattaggcccggggggacgaacgccgcctgctcatgggctgaccgggcgaacaaagagaaggatcggcagaagtacgcgtcgcctcgtcggaggggaagggatattctccgccgatgtcgtccggggcaggattggttgggtaagacccagcaagcgacgtcctttcggctgccaacgagcagcagcaggccaatcgcaagccgtgctgctcaccttctcccccgccttgcttggtcgtcgagaggtattcgtcacgagaggtattcgtgagagcggctctcatggcacgacttcaggatgacggctcggccgagtctgcccaagtcagccgtccgattagtagcggcataagcgcgaggcgagagagcgaagcgtcgaaggcagctgtcaagcatcgcaggcggcgagctcgagagcgacagccaccggctcaagagagcccagccctagtgctggtgcccacgctccacccgacggccttcgcctcgacgcggaagcaggggcagcaagccgcccgcggcgagggagaagacggcggagatagaagaacaggcctttagaagacccttcgtgctccgtcggcggaggacggccgccggccgaccgccggtcggcggtggtgcagcaaaggggcaggaggggtccagaagcggattttagcactccaaccacacgccgaaccacaagtccgagctcaagccgacgcccgaagcccctctgccagccgtctcaaagagcgcctcgcctcgtgtgtcgcccgcgaagcgagaaccccctgctgtgccgattgacctcgacgattcggacggcgacgacctaaaggagaacaagcccaagagcaggaagatcggccgagacaagacagccactccgcccatccaggagaagccaaagaagcagaagaaggccgaggggctctacatggagatcgacagtgagcccgagaagagcttaggaagaagctcgcccgctggcggggcaaacgggaagaagggtgccgcagaagcgcaggtgctgcaacaaccgcgagttggcgtccggattttccttctcttgtagctctctgccagctgatcaatcatcctcgtcctcgctggtcaatcaagcatgaagcgcactgagtcggagcggttctacttcccctcctcagacagcttcgacatcgccgacgtcgacccaaactcattcctcccttggccgcctccacgtcaaccctcgtcccaaacttcacctcctcattcttcgactcggatgacgatgccttctagctgaaatctgcttcaactacactcactcctgatcatcttacgaaatgtcatgtcacgttagctcgcgagtcattccgcctccgcgtttgcgcgttggccccgctctttctcctctccaccccgactcgccggcattacatcaaccgttaccgagactttctcgctctttcacggccgaggccctctcgaacattctaagccaaccgatcttatcaatcatcacctgcccacgtgttggcgcagtcgctaacgctgacgagattgcctccactcttcccctaacgcggaagagaaacgggctgaacttctcagtcggtacctcaccaacaaccatcacctctctctcccacaaaactttcataattccttccacagctaccatgtccttcccggctactatcaaggccctcaagaccgtcaatggcacctcggacgtccgagtcgaggagattcccttcgcccctaccccccttggagctgacgagtgcgtacatatcgtatgattgcatttcgtacttcatccgttcagtgcactgactcttcaactactcttgtcgtgtttagcgtcctcgtgagtcctcctgccgagctcgcatgacgagctagcaagatttcggcgagctcgagcttacggttcattgaccccttctttgtggtgaccttcgcagtccaagaccctcgctgttggactcaacccgtacgtagaacactgctcctgcttgatacaattgacgagcttcagctgacgtgcctctgctcggtgcgaccctcttgacctgcaggactgattgtgagcttctgttccctgatccctgctccttagacccccgcccctcttttgccttgtgtcacatcacgcgtcgccgtatcctctagtggcagctcactgatccttatgctttctaatgcgctctcgacttacagggaagcactctgtcggtggtctctggggcccgtccgggaagtcgaccgtcgtcggatgcgattctgtcggcgaggtcgtcgccgtcggatccaacgtcacccacgttaaggctggggaccgagtcttcggagtgagtcatcgctggttcagtgccagctcgaggccaaacgcacgagctgacctgtgtgctgtttttgtgtgtgtgtgtgaagttcgtcttcggtacctctgacgagtcgaacggatcgtacgccgagtacgtcaagttcaacaagggtgtcgttgccaagatccccgagtcgatgagcgctgttgagggtgctgccttccccgtgagtacacagagtcctcttcgtccacattgagccccacgctaacccatatcaacgatacctttgacctttagatcccccacctgaccgccgtccagtccctctacatccgcctcaacctcgctcgaccctccgctccttccaacgagggtaagatcctgctcgtatggggaggcgccaccgctgtcggtcaccacgccctccagctcgctgccctttcgggctacaccgttttcaccactgcttccccggccaaccacgccaaccttctcgccctcggagcctccaagtgcttcaactacaaggacgcggatgtcgttgagcagatcaaggctgccggagatgtttcctttgccgtcgacaccgcgtgcgaggctgggtcgaccgactcgtgcgttgacgctatcggctccaagggcggacgagtggtttgcactcttccggtgtcagaggagactgcagcccgacgatccgacgtcaaggccgagttctcgctcgtttacacggagcttggataccccctccgattcgccaacgcgctcgacttccctgccatgcccgaggacaacgagggagccttcaagtgggtcaaagatgagctgcctgccctactcgctggatggaacacggagaagaacggaagcgagaaattcaaggggcagtcgctccgagtcatggagggaggacttgaccgaatcgtcgagggtctcaacatcatggtgcgttcagcgtcgcttgtctttgctgcatctaggctcgagctgatctgcctctcccattgtcctatgcactgtgccagaaggagggctcttatagggctcagaagctggtctaccatctctaagatagtctagacctgattgtctgggaattgtctgggtgaagcggaattgggcagagtgcccggatgtggagtccagcagccacctcattggcggagagcctgagttgggttgagaatgggatgacagccatccaccgacgtgctggggaagatgcgttgtccaggacaatattccgagaaaggactgggagggactctagcagttcttcccgtcgctccacaaaggccttttgacatcgctcgctttgggagcttggttccgtcctatgcatgtcctcctcatccgaatcttccacttctggatctgggaggaagtacttgaacgcgtccttgagggtgatgtctgctgactctgccatggctgcacgcgtgtggggtgcaacctcagtatgagagaagagacctaggcctccaagacgggcaaggtagcgagatgagatctgcatccgtgtccatccgacgaggtgatgaccggagatgatgccacctgtccaggagggctttatcgatggatccaccaggtagctcgcccgtctcctccggtcgagccggcggcaacggcgaccgcctttgaattggaatggccgagagtgccgtgccgtcgccgcttccggcagaggttaagcggcgagcaaaagaggcgttcagaggggcggttgccgccgtcgatgggcggatgagcgaggggcggcgatggtgttggtcggtcggtcgggcgggcggtcagctcaatgatgtcggacgcgactgggcggtagtcgtccagctgtggcacacgtagggtcagcgctggccttgccgccccgatttaccgaccgaaggcgtcaaacgtcagctcagtcggaaccgacggcatgccgccgagacggctgcttctgaagccaatgggcctgacagcaccaccccgacttcaacggccagtcagtctctacacaatcctggacgtcggccgacgacgctcgtcgtcaagtcaggtcagcatgaaggtcagcctggacaatgtggtccaggggcagactgcgataaacggccatgcggaggaccggcgcgaaggctcagcgcgagacagacccgctggtcgctagtaggcaatcgacctggacgcccgactgtcctgcaggctgaacaggccggccgcggagggcagtacgtcgcctgggcgttcatcgaggcgagcggggaaaagcgagagtctgagagctgagcgcgtccgtggtcccagttgggccttcgtcgagcgccgaggagacaaggcggcgaccatcgtttgcgagagaagggaacagtcgacagccggtcgggagatgaggagagccggttgtcaatgttctggcgttgacggcgcgccgcctcgacagaagccttggcccacgagaagacgagattgaccgaacgaccggagacagcgagaatgcgctgggccgaccccctgtcaaccttattcaggccagacgatctgctggaaggacaagactgcgacccaacggttgagaagcgcgagtcagcggggagacgcagacctgagaagacaggggccgacctggacggtgcgcagctcgagcggacgtagctcagacacggacttgcgactggcgagtcctggatcgtctctgcgctccacagcgaggacgccacagatactactgcttgtccgacgcgagtcgcagtcgtcattgccggcgtggagagattcagagcgcgtcgaggatggccgctggcgacgacgagcgcgagcgatgcaggcggccgaccgtcccaagatgccggtggtcctggccggacctggacgcgagaccgacgtcaagacgctgccgccgcttgtgagctcaaggtatgcccagagaaggggcgaccgcaggagcgaggtcgacggccgtcttggaggacaacggtggggtgacgaacgcgtcgaccggcgtggcccatctcggtcctggacgcccagtgggtgggctgaaagccgaccgcatactgcaaggttacacagctcgccgtcgaggtgtcgtccagccgcccaagctgcgaagggaatctgccagggcaggtgagtgagtcgtgagagctggcctggcaaggtcgacgttggtggacgagcgacgcgctcgagcttctcgcaacgacgaccgacgcctttacagacacatacatcctccccttgcatactccctctctagagacgggcaggatgagaagcaagcacatagcatcggagtacgagcataccttggacttgtagaatcacccactagcgacggacgggggtggtcgtccggcacgacgaggggcacgccttggccttcactctccgtctgctgatagcctaagcgaggtcgggatggccggacgcgtaggacaataaaagcgacggggtcgccgcccttgaagggcggcatgagtgaaggtcaaaaggaggaggttcgcaaagacggccaacgcttttgaaggcctctcgcagacgggtcctttcttttctttcgtgtcgaggcggagatcgccgccgctcggagggacgacacgcacgtcccacaaggcccgtcagccctcggtcgactcccttccctcaccctctatcctcttcaagatggccgccagacactcgctgctcgagaaggctgaccccgagtcggacttcgccgccgctgcacctcgtcccgccacaagctcggcacgcaagccttggcttgtcagcgtcgcgctcggctccatcgtcgctctgcatctcggcgccacctttggaccttcgctcgtcggcgatgtctttggatactacggctgccacggcaaacatgctctcaaagagggctatctccagggtgcgttccacttctcacggcgaagcctagagcgaggagactgacggcctgccctgccttccttgcagcacttatcgacgacggcttcgacgtccagcagccctacacccaggacccgccgctaatggcaaaccaccccgcgatcgcctactccgagcggcagctgacggccggcttcccgatcgcgcccaaagtcgcggagggcatcttcctccaggtgccgaacgaggagtcgtgccaggccgcgagccgacgctacaccggcaccgagcacatggccggctcgggcttcgaccagatctcggccttccggctgaaggaagagtacgagcgtctgctcggcatccccgtcaccggcccgttcgaaaacctctttgaggccggcagcagcgagagccaggcgatggtccacgacacccaggcccgaccgcaggtctggatcgacacctacttcccggtcctcaacaagccggtcgaccgcgagatctcaatcctccgggccggctcgtccgacgctgcttggtcggccaagctcagggaggacatcgtcgagggcgacgagttctcgaagctccgggacgaggtgcccgtcttccacggcctctccaagagtggcaatgtcacggcccaggtcgtctatgccggctacggccgtaagagcgactttgacgcgctcaagaaggccggcatcgaggtctcgggcaatatcgcgctcgtcaagtgcggtccggctacccaacctctgcgcgcccgcttcaactgacgtcccttacacaaccaacaggtacggcggcgtcttccgagggctcaaggtcaaggccgccgaggaggctggcgcggtcgcctgtctgatctacagcgacccaggcgacgacggaccgatgaccgaggccaacggccacctgccatacccggacggcccagcgcgcaacccgagttcggtccagcgcggcagcgtcatgtatctctcggtatatcccggcgacccgacgtgagtttccttgcccttcattcatctgagcccaactgacctcggcgatcatacacagtacgcccggcgagccgtcttaccgcaacgccactcggctcgagggcagcgggaacgtccctggcatcccctcgctccccgtctcgtacgaggacgcaatcccgctcctgcgcctgctcgagaagcgcggcaagaaggcgaccgagctcggcgaggactggcagggcggcctacagcacctcgactactacaccggcccgagcgaggctcaggtccgcgtccgcaacgaggtcgcaacccgcgtcatgccgatctggaacgtcatggccaagagtcagtcactccttctcgcgcttaagtaggaggtttagcctgactaatgacctttcttgtcgccagttcccggctacctggccgaggaggccgtcatgatcggcaaccaccgcgacgcatgggtcagttgctgcagctgtggttctcttttgcagtgccatactgactgcgctgtcgtccgggcatccaggtcctcggcgcatccgacccgtcatctggcacggctgtcgtacacgagatcgtccgtgggcagggtgctctcctcgccaagggctggaagccgctccgaaccgtgttcattgcctcgtgggacggagaagagcatggcctcatcggctcgaccgagtgggtcgaggactttgcgaagacgatcgccgagcgcgtcgtcgcctacttgaacagtacgtcctttcagatctcgacgtcgacccgcagcaactgatctgaccctcgtccctcctctgccgcactgcagtcgactctgctggagctggaacgacctacggcgccagcgcttcgccctcgctcgccgggttgatgaaggccgcctcgcaggagattcaacacccgaacgacccgtcgcgctcggccttcaccccagcggccacctccgattcggttgccgacctcgacagctcgactggcatccttgcgcttgggtcgggatctgattattcagcactgcttcagcacgtcggtatcgcctcttctgacggtccagctttcagcccgtcgcctgaagacgccgtctaccagtatgtccctcgtgccttcccctctccaatcccgatcggcaccactcaccctgcctcctgatttgcctctcagctaccactcgatctacgacaacgagtactggatggagaaatacggcgacccgggctttggccggcacgtcgtctcggccaaggtcctcggcctcgtcctcctccgcatggccgactcgctcatcatcccgctcaacgtcacccagtacgcgaccgagctgaccgactacaaaaacaagtgcgtgctgtcgctttgacaccctgacgtgtcggggctgactgaccttcttcgtcgcattgcggttgtagggtcgcgcgcatccactcgtcgtttgagtttgaggactcgctcgatctttccaacctcacgcacgaaatcggccgcctgcagcgggcgaccgccgcgctcgacgtccagaaggaggctgccctcaagcggctcttcgaactgacgcatccgcgcaagggtcagggcaagctgccattcccgatgccgggcaagtgggccaaaatccgggtcgtgctagaagagatcaaaagcatcaatcacaaggttcagcagttcgagcagggcttcattggcgagggcctgaaggaccgcgagtggtacaaacatgtcggaacggcgccgtacgtcctggcgagtcgtggccccttctcgtaccggatgctgacgcgcactacctccctttgaccgcagtggcaagtggctcggctacgttcgtcccatctcaccctccttacagacaactaacacttgctgacgccttccgtcgacctctttatgcagggcgcgacgaccttcccgagcatcaccgaggccctcacgctcgaccgcgacgtcgccgccgctcaggtcgaggccgacaaggtcgcgctcctgctcaaggcaatggccaagcgcttggagacctagcctgtgctgccttcttcacgaccttcctctctctctgctgtcaatatacatgtcgaccgttttctgttctccgcgcctgtccgctgccctcaacggggccatccctccgcgtaggtggtttttgaatcttgacggtgatcatctattctcgctccgcacggcgccgacgtcgcagcgtgcaccgagacggcttccctcgtcgccctgctctccctctccgcacccttaagcctcccttcaaacaccgtacccgaccgtccaagaccgcacattgtacctctgccagtcagagacagaccgccagtctccctcaagggtcacctccaaacccccgtctctcgcgcgcaccagcgccccatcaacagccgtctcctccatcgcgcactcgctcgacgaccacgccgcccggagcccgaccgactctagcgccagatgaagggtctcaagaagtccctggtacgtccagccaatttgcctgacccagcgcgtcggacgagggagacctcggcgaatggacggcgccccaaacggcctcgtgcgcccgggcgagtgcgagaggggggtcgggtgtcctgcggatgcacgaccgccggcaggagtcggccgacagccctgaggtccactggtgggcctggctgagcaatccagctctcttcgcatgcacctcgcggttgcagaacgagcgggcttgcccgggatctggagcgatgggcgccagacagtcggcgccatcaccgcctccctcgcgcctcgcccgctttgagccgggccgatcaatgctgccctcaaggagcttgattgttgacccagccctctccgctccctacttttctagctctcgcgcagtaaaagctcgtcgtccgactcgtccaagaacaagaacgggcccgcaccgacgccggcgccggccgcgcctgcgccgcaagtgaccaaggccaacggcagcaagccggtgccgcccctgccgtcgaacggccagccgacgccggcggtcgcctcgctctcgaattttggcgtcggtggtgggggcaacggaggctcgcagcagggccgcaacagctcgccgccgggcccgcatggccagggtgggccgtcgacgcccgatcgcaagtcggcggcggcgtcgcacgacaagacgtcgcctgcgccgcccgttgtcgtcgtcagcaccgaaataccccaggacccggttgctcacggaagggcactttcgccggcgagtgcgggtggcgagcacggatcgggcgcgacgcctccgaagtctgggcctcttggccggctgagaggcgtcaaggacacgattccggttaccggcaagacgccgcgcaagcagcggagcagtcgcttccatgtgacggagaagcacgagctggagaagctccctcagttccatggtgcgttccacctgacttgggcaaccccccttcgctccggccggcgactgacccttcgcttgctcccctccccgcagaggtttcggccagcgaacggaccgacctcttcatccagaagctgcagcagtgtgccgttgtcttcgacttcaacgacgcgagctcagacctgcagagcaagggcatcaagggacagacgctgcacgagatgctcgagcacatcacgacccagcggggcgtcatttccgagcagatctaccccgaggtcgtcaacatggtgcgctctcccagctgacaggtgccttcctctattgaacccagctgaccctgttgtccgtcctttgtagttctcgagcaacctcttcaggtcgataccgcctcaggtcaacccgaccggcgacgcctttgacccagaggaggacgagcccgtgctcgagctggcgtggcctcacctgcagatcgtctacgagttcttcctccgctttgtcgagagccccgacttcaacaccaacacggccaagaagtacatcgaccagtcgtttgtcatccacgtccgttctgccgcccgctctcctctgcccgctgccgaggctgacctgtgccctgccccttccagctgctcgagctctttgacagcgaggacccgcgcgagcgcgacttccttaagacgacgctccaccggatatacggaaagttcctcaacctccgggcctttatccggcggtcgatcaacaacgtcttcttccagttcgtctacgagacggagcgccacaacggcatcgccgagctgctcgagattctcggctcgatcattaacggctttgcgctcccgctcaaggaggagcacaagacgttcctcacgcgcgtcctcatcccgctccacaaggccaagtcgcttgccctctaccacccccagctcgcctactgcgtcgtccagttccttgagaaggacgcgactctgaccgaggaggttctgctcggcctcctccgctactggccaaaggtcaactcgccaaaggaggtcatgtacttgaacgaggtcgaggagattctcgacgtcatcgaggcggccgagttccagaagatccagatcccgctgttccagcagctgtcgcgttgcatcaacagccagcatttccaggtcgccgagcgcgccctctactactggaacaacgagtacattggtccgtccttcctcctcttgcaccagcgtgtctgctctcgctgaccaaccccctccccgcccctttcagtcaacctcatgggcgacaacatcaacgtcatcctcccgattgtcttccctgcactctaccagaactcgaaggcgcactggaaccggtgcgtcgctacgcccgattgaccaccacgacgagccttggcgctgatcccttttgacccgaccgtaggacgatccacggcatggtctacaacgcgctcaagctgttcatggagatcaacccgacgctctttgacgagtgtacaaacaactacaagctcgccaggcagcagtgcgtcgttctgctcattccttcaaggagacagcccgtcactgaccaccccgtgctttcgcttgctctttcaaaagggagttcaagaagatccagactcgatacgatcagtgggagacgctgcgcgcgaacgcgatcgccaaccgcaaagcgagcggcgcgagcggtcctctgccccgtgccttgaccgagactccgccgccccggccgccgccaccggaggacgacgacatgacggacgtctcgatcgagctccagaacggcaccggcctggactcgtttgcgtcggacggcccaggctcgggtgggcccttccagatggagacggcgccggtggaccgggccgagatggtcgtgcgtcttcagtcttccctctcgcgttgccaaccgagggccttgctgatcgctaatgctgctccttcgctctttagcctatgggcgatgaagtcgaggcaagtggaccgccgtcagcagcaggcaacttggccaacccgcacgttcggcgcaagagcacgcttccgatcgatccgcaagtcctgcgcgacctccaggcccatcgatcactcgaaggcgagaacggcatgtgaacgctcgcgtcgtccttgtccttcgaccacctcaatctcgcgcagtcggtcggtcgcgtcttcaggcccctccgtcgcccgtactcggtaggacccgttccgaacctcaccccttcttctctcgagccacaggactggcagcgccgtcgccgccctcagttcgcaccctccgatacacgtctcgccgtctgcgccggtcccggctccgtctcctccgctctcgacggctgccgcgaccgccccattgtaccctcccctcgctccccttccacgccccgctcatgcttgcaaaccctcgctcgccttccttcacctttccttctcatccctgtcttctcttctgaagccccctgccttgcatcgtataccccacacccgaccacgtcccgcttctggtctgctcgccgatcccatggctcgttgagacactcgtcgctggtgaggcgtaggcgcagcgttgcgcgagtggactctgggtgtactgcccggtcgtgtcgcttatcactcggcaggcgactggctctacagagcggcgctaagagcttgtccagatcgtgccggcgaggactggcaggtgaggaacgcgtcgacagactgcgtcgcggatgccgggcacgcggggacggtcagctttgtctaacgaggcacagctcctggaaagacgtaccttgtgactatctggagcgaattctgcaccccatttggctgatcactgaccgctcaaaggcggcggaagtgttggtacactgcgaagggacggccggacgcgccagtcgttagctcctgcctgatgagagacagctccgtagcacaagacacacctcgcaggacgtcaaacggctaaagcccgatccgctcgttcctgctcatgacccccctccgccggcgctggtcctcgagatggtcggccgccgccgccatcgggtcgtccgggatcgacgacgggcccgaaacgtcgccgccggcttgggccggcgctgctgccgcgttattggcggtgctgcgaccgctctgagcgtctcggagggcctggatcgactcgcgcgcctccttaacgtcctcggatgtgatcgtgatggctgtcggtgtccgtcggatcattttgcacgagcgttaagaggggctgttgtagtcggaggcgtgctggctctcggcttggccctgtccgctttcgacctcgtcgcgcgtcgctcctctgccgtctccggtcgcccgacgacatctccctcttcacgcccctcccagaaagatgacgagcgaagtctacaagaagaaggagctggcctccctcatcaagctgccgggtaactccaagtgcgccgactgcccagccccgaacccgcagtgggcgtcactcggcttcggcagtgagtctcgtctgccgctctcgccggagcgctcggcgggctgaaacagcatcgcgcgaccggcctcgtctgtccctggcaggcttcgtctgccttgagtgcagcggtgctcatcggggcctcggcgttcacatcacgtacgtccgtcgtggcgtctgacagcgactcgctcgaagccaggctgatcacttagccttggcgcacttccttccctgcagcttcgtccgttcggtcaccatggacaagtggagcgacgagcagcttgaaaagatgaaggtgcgagaatcacatagtatgaagtccgtcctttcgactgacggcatctttccttaccccgcagcttggaggcaataccgcgctcaacgacttcctgagcttgtatggccctggcggcggtttcagcccgggcatggacatcaaggagaagtacaactcgtgggcggcggcccagtacaaggaaaaggtacgccagcggccgatcaccctgtagacgccttgctgacgcctttccacagctcgctgccgagtgtagcgaccctcccgtcgcgtgggcaccgtccgcagcacctccagcgtccctcgcgccgcccgcttcggcctcgtctaatagctcacgcccgacctcggcccagggcgtccgcggctcacggggggcctacggcggcggcggcatctcgagctccgactaccagtttggctcaccgtcgccctcgggctacggcggcggtggctactcggacgagccgcaggacgagcgctcggcgcagaaggcggcgaacgagaacttctttgccggcatgggcaacaagaacgcctcccggcgggaggatctacccccgagtcagggtaagtcgtctccctgtgcagcaggcgcctgacgccttggctgatcgactcgtttgacgcccttgcaggcggcaagtacgccggctttggcagcacgcccgacccaccgccgcagtcgaaccacccgagcttcgcactctcgtcgcacaatgcgccctcgctcgacgacatccgcaacgacccgctgaaggctgcgagcaagggctggggcctcttttcggccgccgtgtgcgtcctcgccatcgattttcttcttcgtcagacttggctgatcttcagcctttctcagctcggccgcctcccggacggtccagtcaacgatcgtcgagccagcgatccagcagctctcggaccctaacctccaccagaatgtccggtccggcctctcgacagcggcgacccaggcttcgcgctggggaacggacgccaacggcttcgtccgtgatcgggccggcgtcgacctggcgtccaagctcggcgagctcggacttggcgcgggcgggggtgcagctggacgggcagggtacacggctggccagaacggaggcttcggagggccgtcggccggctacgacgcctacaaggacgagtacgaggacgactactcgcaggtgaggcctgtacggatgtggtcactaccgtgcggtcgctaatagctctccaccctgcagtttcactcgtcgccggccgagtcacagccggctcgcgcgcctgccacggccgcatcagccaagaaggcgacgcctgcggcaaagaagaagacggacgactgggacgactttgaggacttctagacgttgcaagggggagccttgatctgcgatgcgctctcagctctgattgggcgtcaggaagctcatcttctgcggctaacctggcccggcccctttcatatgaacctcgactcgacggccggcatgtagcaagctgaagccgtacaggccttccagagacgaggcgaagctggcgctgcagagatcggggatgcagcgggaagcgaaactgcaggtacatgagtacaaccctcatgctcgcgataagcagccggcctattgagcacaggacatccatatacgaagcacaaagaggatgaagccccgcagggagcagaaagttgggaagtaggtatcgagaggatcaggcaagaagtgacgggctggaaggcggacgtgcgcgacctagtcgtcgccatccgtccttgcgcgcttgcccttggccctggagacggggccgcaaggagcaagagaagccgtcggtcagcgtgagctctcgagagcaaggcagagggggaaaagagactgacttctcactaagctcgagcccgccccgcttcttgccggccttggcctggtcgaggaactcgtcgaggccgaacgggtcgaccgtcgcgaccgtgtccttctcgaactggaccggacccgaccgctcgcccgcggcggccggcccatcggtcccctcgaacgcgtgcgagacgccgagcgcgaaacggtcgttctggaggttcttgacgacaccgtcctcggtgccgccgccgtacgtctcgtcccctgcggcctgggccgtcgacgagagcggcttgtagatggcagccgccgcggccgagccgtggaagagcggcttgtcgtacatgttgtaagagtcgtcgccgccaaacgagccggcgagcgtctcgcggttaaagaggcgcgagtcaatcatcgtctccttgctcgccgtcggcttggccaggccgagcgccaccttctccgagatgtcgcggttctgctccctgtggacgcgagggagggagcacgagtcagcctcgtgcaaacgtcaagggaggaggaaggagggtcgacccacttggccatcatgatcgcccgcttctcgttgcccatgttgttgagccgcatctcgcgctcgcgctcctgcttcttctcgcgccgcatgcgctcgcgctcgcggacctcctcgttgtcttcctcggcatcgctcgccgcgctgtcgctgtcggacgagctgtcgtccgacccactgccgtagccgccgagcgcgcccccgagacccgtctcggccgccttgcccggcagaggcgcagaggggataccggcccggtcgtcgcgcgcacgctgggcgagcaggcggaggttctcctccttggcggccttctctttggcggcaatcttctgctgcatgagcgcccgctggcggacctcgtcgcgcgcatgccggtcagcgacgaacagggcctcggagaacttggcaaagttatcgttgatgtggacctgcaacagcggaacgaggtcggggtcagctaaagggcgggcgagcagggaggtctggagtgaaggcacccacgtcctggaggccgcgaccatcggcggcgagccgcttgtcgagcgggatcgtgtaacccttgttgttcttccaattactgatgcagggcgggatcatccactccttctgctcctgggcggtcgctttgcggggcgggctccgcagctgaggcggcggcgggcttggcgggccgcgcggaatcttctttgccttgaagcgggccggctcgagcgggtcctcaacgacctcggtcatcttgatgattcgctgcgagacggtcgactgttgcgaaggcgtgtagcggatgtacgacgtcgacccttgcgagtcgggcacacgcgacggctgggcggcctggatgcgcgagttggtaatcttctcaagcgcgagccgcgttcgctcggccgtcgacatgacctcctcctccgaaggccgctccatgtccttctccttcttggagaggtcggtccgctgcttgatgggcacgaggtctgggcaagcgggtgggagggcagatgtgtcagcgcgcgggcgtgtggtgcaagatgcccaaccggccaccccttcgccgaagacgcacccttgaacgacgactggacgttcttgccctcacgctggccctgccgagcaatggccgcatagtcgacgttgccgtcctggtcgacctggagcgcgagcgtctttccgttgccggcggccgccttcttgcgcccgagctcgagcggatactgggcgatcgggcactcggggtaggcgccgccgtcgccaaagtcagcctgggttgagggccggaagctcgaccggtggccatagggcggggcagaggtcgtcgtcagcgccatcgaggacgacgcggccggtttggcggaggacgacgaagacgacgaagcagccgcctgctgctccgaggccggcttgtagcgcggcgtcggaaggaggctgccaacggcgaggcgaagagcagacatcagtcgagcagtcgtcactcgcctcttctgcatccggctacgtacgaggcgagggcggccatcgtatgttgcttgttgcctggagtgtcggtggctggtagagagagggtcgtcgagctcaccgccctcgaggccatcttgggccggccactttcaacctccgccacggccgcacgcgcgagcgagccgacgacagcgcatgccgacgacgacgagcagctctgcctacaacgacccgacctcaagactgccagctccatccagacggtctgaggatcaggccagctcgtacatcgaccatccgagcacgacctacgcaagagagacggacgcgcgacctcctcctcctcctccccttcccgccagccgcttgcctccgacgcgcgtgcctgcctgcgcaacgacggacgcctctctctccctcgtcggctccctttggcgttccgcagcagaagtttgggcctccgtagtcaatgtccaagccatacgacccgatccgcgactgctcgccctcggtcgccggccagcaggccaagctcgccaccccgcagccgcctgcgatccaccggacgggctcgaactcgctgctcgacctgctcgacggcccgccgccgcctgccgcagctacgagcagcgggagcgacagcagcgagggactcgagagtcccgacctcgactcgcccgtgccgctccctgccgctccactacccgtcgccgccggcgtgagcggcacggcgcccgctggccgacctgcgaccgtcgctcctccgccgccggtccagcaggcaccggccgtcaacccctacatctcgcccgcgtcgcactcgtcgtcgctccctccgcgaccatcctcctcctcgagctcgtctcgccactcgcagccgccggcttcgacctcggccggctcgtcctcgaggccgacgacggcgacggcctccggcagccgaccgcggacggcgtacgctcccaatcgggtgacgccgccttacagcatcctccgcgcgctctcggccgacgagtacgaggctgcaatgcgggatccggcgcgtggctcgcggaatgcgctcaggggctggaaacgaggcgacgacgccgcgcgggcgagtgctgggtcgtcggcgctcggcgagggcggcggtgctggcgggcctggtaagcgcgcgctcgaggagggtacggatagccggccgacagagggagagaagcgtcagcgggtggacgagttgccgaaaccggttgaggacgtcaaggcaatcgcctcgcattgtgcgtcttgtcttgcttgctttcgccggacattcagcgtcgctgacttcccttccttcccgcaaccgcaagacaaccaccggcccgagtacggcaaggacaaccggcgcttttcgcccatctttggcctcaagtcgttcaacaactggatcaagtctgttctgattggcaagtttgcgccgctcgccatcactggccagatgggcgacggcatgacgatcgcgcccagtgggaggggcgtcaggaggccggagccaaagggtagcgtgctcgaccttgggtgtggcaagggcggggacctcaacaagtggaatgccgctcgtgttgcgcggtataccggcctcggtgcgtgcccctacagccacgacttgtcgttgtgacggacgctgacctgccatctgctccacccccccggcagacatcgccgacgtctcgatcacgcaggcagttgcccgggccgaagacatgcgtaacatctgcttcgacttcgagttccacgccgtcgactgcttttcggtgcgctcgcccccgccctcacttccaacccgcctcgactgacccgacctctgttcctcaggaacccctctcatctgtcctccctccggcaaggctcgaccagcgaccattcgacatggtcacgatgcagttttgcatgcactatgcgttcgagaccgaggccaaggcgaggcagatgctcgagaatgtcgcgcgggggctcaagcctggcggcgtcttcatcgggacgacgccaaatgccgagaagctcatgtttgtcctgttggctttcaatttcaacctgcagcacgactgactagcgtgttatgaaactgcacctctcagcgagcaggtgctggccctcccagaggacgttgaacggctcgccttcggcaacgacgtctactcgatcgagttcagcgaccgctccgatttccggccttacggccaccgctacgagttttacctccaggacgcggtcgaggacgtgccagagtatctcgtcgactggcccaacttcacctcgtgcgccctgacccctgcttgtgccgcgtggactgaagtgcttcggcgctgacccttcctcatgcgcccaggctggccgaggagtatggactctacgtcgtctacaagaaggagtttcacgaggtctttgccgaggagaaggaccggccagagttcaaggagctgctcacgcggatgaaggttgtcaacgccgccggcgagagcgagatgaaccaggaccaatgggaggcagcgagtaagttctgcttctgcgccctttcctgtcggccttgatgctccgggtagacgctgatattcgcctcctacagatttgtatctcgccttcgcgctcgagcgccgctgagcttctaggctggatcacgtctgttgacgctgcgaggcccgtgcgcagcgcggctcgactcgcgcgcttcgtcggggtcggtcgttcgggaccgggaagggtgctgctgttcgacgcgtgctcattgtattagttgccgattgtggtcaggaaagtctgtgagaagagaggactggccaagacagagtgaggcaaaaggggctcacgcgcgtcaacaaaaggggggggggggggggggggtgcagggccaatacgccgggccaagacggtcagcagcctccttaagaggacgacggcgtgcagtccctctggtctatctgttcgggctgcggtgttcaaccagtccgagccgcagaccgccctagcgtcgcctcccgtgcgccagaggtcacgcaatgaaccttggccgacaggaggtgttagccgggtagtcggtcctacaggtagcgacaccgctgtcaggggggctggaggcgcgttcgggctgcgttgaaaggggggggggctgatcagcgggcagacctccgtcaggggtgttccctcacgccgcctttcgccgcagccactcgggctcatccggacgcgcctctgctcgcgggagaaacggagcccgagggatcgttaggctgcttcgccgccggctcgaccctcgcgagggctacacggcgcacgcgggctcggccgagccgttcgacgtcgccgcccccctttgcttgccgacgagggcagcgagctcgggatgagctgctcagaggctgaagaggtcagcgacgctgagcagatagatcagcgtttgctctggaagtcgtgcgaccgattgacgagctcggagggcatcgtctgttggacgatggaggccgttcggggagagcgagacgagctttcggagggtcgggcgaagagacgcgccgggactctcgcttccatgcgagactcggtcgctggaccgcagcactcttcctagacccggaacgcgaggtgtgccggaacgacatcgctgtagtcatacacgggaggccaaaagagccaagcgagcgaagagagagcgagaggaaggaagggagacagattggttttggtggttctgatggtggaaggacgacatcgtgtccctccctctgcaacgcccctcgttcttcctcctctccctccctgacccctctggcttatcgtctcctcgaagccatcggtccgtcaccgcggtgcctacaacagcagaggatagaagaaggggggtggggaagctcaagccaggaaggcccaagccccgcaaagaaagagaggaagacaaagaggaaaggaaggagggcatgctagagggcgacgaccgctttaggcggccgtgccggtcgggcaggcggccgagatgtggccgggctggccgcacgagtagcaagacttctgggccgggccggccgggcagtcgcgggccaggtggccgacctcgccgcagccgtagcaggcaccgccgccgggcgggccgcgcgagccgccggcagccgagggcgacgggcaggcagcggcgatgtggccgggctgagcgagaccagcaagcaggtcagcgacaggtgaaaggtggcgaagaggagagagcgacgcacctgtccgcacgagtagcaggcgcctccgccggcgccgcgcgagaagccgccgccggtctggggcgacgtgcaggcggcagcgatgtggccctggccgccgcagttgtagcaggtcttggccgggccgccgaagccgctggtgaagccaccggcgccggcgccgccgtaggcacctccggcctcggggcacgagcgggcgatgtggccgggcttaccgcactggcgaacgagagggacgacaagactgagtcagagctggacgacgcagacagagagcaacaaagagcgcaccttgtagcagtcgcctccgcctccaccgccgaagccggcctggggagcctgggggcactcgcgcgagaggtggccctcctcctggcaccggtggcacgtcttgggcttgggcggctggtcgcagtcgcgcgaaaggtggccgtcgccgccgcactggtagcacttgggggtgccggcctgggggcaggctgcgtgggagaggaggggaggatgggatcaggatgaggagagcggggaccgagcgaagggaaaaggaagcacgtacccgaagcgacgtggccgcctgagaaaggaaaaccgttggggaagagcgagcgaggcgagcgtaaggatacgagcgagaggacaagcgagcgggagcgaccggtagacacggttttgaagaggagagggacgtggtcatggtatagcgtcggttttaaggtacgccatacacacagaggaccacaccacatgcaagagataggaaagagggaagcgtatcttgtcaggtcatcgcctcggacctctcgggcaaggcaagaaggggggaaagagaggaagagaagccgccgcgcaagtcgccactccaacctgctcaggacgagcaggtcggtgccctcccgtcgcaacgcccacaagcgaccaaagaaggcaacgcacccatgccgcagttgtagcaagcccggttgaacattttgtgtagagagatgaggggttaggtgagagagtgagaaagctggcctggcagcatcagaggaggcggaagtcagcacttggaaatggacaggcagggcgaggtggcggtcggcaggcaaggcacgacgacgagccgacgagctctcgacggggccgaagccgagcgagcgacgagcacgcgggccgagggacgatcctcgcggccagtcactccatgtcgtccgtccgagccaagggaaaaagaggaccgaccagtggtgtgggtggtggaggagaggaagagggcgcggccggctgccagcacaggccagctttgcgaggccgcacgcgcgcgcgcgggcgaaaagccctgacttgcatgagcaattcgaggatgctagagtgcggtgaccgcgcagctgaccactactcggaggccgacacgaagcccggcaggctgggaccagctgagctggctgaccatcattccgacctcgcgacgcaaacgccccagctcatcttgcccacctggctggccttgtcgcctgcctcatccagcgtgcgtcccttccctctccgtgcgagggtcgatcgcttaggccgcaagggcagacgacactgccggccgagcgcggagtgtctcaacgctcgcttggcccgagccgactgaccttccgagaaccatggcccgtcaccagcaaggccagggaggcgctgacgatcggacccctcctccttccttcgaaccagagaacccgtttgcgccgtcgtcctttctctcctcaggagaacttactagcggccgcctgcgacctacccctgcccgaccctcccctttcgcgcgcaggccgactcagcgcttgagagcccgagcgtctccccgttcagctgcccctcctcggcccatccatcctccctcatcgtcctcagcgatgccggcccgcctgccgttcctgctgcttctcgcgccgctcctggcaacaacgccgcgaccagcagtcgcccaaggtatcgtcatctcgacccgtgcgtcaccggctcgcatccctttgacgcggcgcagcgtcccatctgcttgccagcagaggcctgtcgactgaccttgggtttcccttcatttgccagccaacccgccgacaacgagctcgccggccaacctgccgacgccgggcaacatcagcccgagctggctctacgccggctgcttcaccgacccgctcccggcgtccaacgcctcggaagcccacgctctctctggctcgtacctctacagcctcgacctgacgccggtccgatgcgcgaccttctgcggcagcggcggcttcgcattggcgggcgtccagtacgagacgcagtgcacgtgcggcaacaacctccgatcgtcagcccagctgacggccgaggccaactgcgacgcaccatgctcgggcaacagtctcgtcaaatgcggcggcacctaccacatgaacctgtttgtcaaccgggtccttctcgacgccattgctggccagtcgagcgccgctctttcggagccgacgtcaagctcgacccgggccgtcgctgccgtcgcgtccacaggctccatcagagcagcgtcgtcggccgtggctgtcgttgccagccgctcgtccgcctccgtcgctccatcgtcctcctcggccgccgccatccaatcgtctccggtcatcggtgcgtcgtcggtggcggtcgaagcagccgctgcgtcgtcttcctcggcggcagtggcagcggctgctgcagcagcagcatcggcggcagctgtgaccgccgcagcctcaaacagcagcggtggtggcagcggtggcgtgtccggcgggacgatcgctggcgccgtcatcggcgctctcgccgggctcgcactgctcggcgcgctcctcttcttcctctgccggcgccgacgccagcgtcagcagcgaggctttggctcttccggcgccaacgagaaggccggtggcaatggctcggccatcgctctcggcgccgggggcgcttgggcacgtcaggccagcggcgggtcgtccgaggagggcgggacctcggccgcgtacgaaaagagcggaagcggtctcgatgccgagctcggagcggcgcccgacggtgccggtgctggccttggccttgatggtgctggcgctgctgtcgctggtgcccgtcggagcagcttggcccgctccaatagcagcgacgacgagcacccgcacgagatgccctacgtgctcggacccgtcataccggcgtcgcccctgctcgggcccggtgctgggctccttgctccgatgccgacaccctccgatggttggcggccgggcccctttgcgacggcggacgacaccccaccgccgaaaagggagcagaaccgtcgggcaagcatgccccttactaacggcgacatctacgccccgcccctcggccctctcccgccggcacctgacggctcctcgggtcgaagccggtcgaacgagatctcgcgtgtcgtctcaccgttcgcggacccgccgtcggtgctgatccacgcacggcggccatcgacggcgctctcaggcaactccttcgccactgcgcccctcactggcggcaccggcggacgtcggccctcggagggcagcacgacctctgcgctcggcggccgagcggcatccgtctcgaagcaggcgcgcaagccggtgcccgcgctcgtcgacggcgacgcgcacgcgctcgagcagcaacagtactataatggcgctggcgccgccggccggaaggcgagcgacgactcaaccgcgtcgtcgtcggtcgctgagcttctcggcggcgcgcgcgagatgctccgagaggacggcgtcgggctgccgagtaacgagccgtcgccttcggccggcgtcggcggcggcagcgggagtaagacgcccgacctattcaagggctgggacggcaagcagctccggacgctcgacgtcgacgagcccttgaagcagtgagatgccagacgcccctgccagacccccgaccatagacgacctgccctcccatgcacccctctccatccggacactcctgctccctgtggacaaccccccttgatttagtttggccgatcttccgcatctctctccctcttgtagtctcatctccccggtctcgactcttgtagcctgcatgccgcctcacctccttcgaccctcgcgtgtcagtcagagcggggtcgcggcgcatgacgcgaaacgaggcgcccggcagccgcgcgcgcagcccgaccgacgacgactgaggcgaagctggaaaacgacccgggcgcgcgcgcgcgcggtcgaggctctcttgctgtccagcgaggcagctgcaggcttcagcccccgcaccacaacctccctccgacttgctgccagtcgaaacgtacccccttcgcacccatcctctctctcttgatcgcgagagccagacttccatctctcaatgtccaacccgtctacggcgccagcagcccaggacgcgtcgtcatcgacggtgccggccgcaggcagcaccaaagggacccacgtccgagccgccgtgcaggccgtcaagaaccggcagaacaagacggttccggtcgtgcgtcgcccttcctccctgtcgacgagcgcacccagtcgggcagctcgccgctccttactgcccgtagtcagcagcctgtgctgaccgagccgccttcaaacgacctcctaccttgcgatgggtgtgggctgaaacttcgctcctcgaccggccccctcctccttgcgcctccgccttctcctgcttccacctgagcagccgacgatcgactttacccagcacgagatggaggacggcacgatcgtcagcacgcaggagcgtgtcgtcaaggatgtgcgtccccgctcggccctttgtcctgggagatcggctcgtccggcgaggtcgggacgggcacgggagctcgctccgggctctacctcgttcgagctgagcaccgccagcgactgatcctcgggcctctcgtcctctttcaggtgcaagccccggcacacgctctcccgacagacgagcagttctacatggacggcgaccggacaaagcccgacattgcctttctcaagaaccacttctaccgcgagggtcgcctgaccgaggagcaggccctcttcattctccgcaagtgcgtcgccgcctggttcaagcgggactacgaagaagaaggacgtttgctgacagctggctgccgccgtgtcttgatcaggggaagcgagatcctgcacgaggagccgaacctgctcgaggtcgacgcgcccatcacaggtcggtcctcttcaacaactgtcctggcgaagccgagtgagctgagctgaccgtttgcttcaaacttgtggacgctttgatcagtctgcggagacatccacgggcagtatgtgagtccgagccgcccaggccagaggctgtcgacccgcagggctttcaggctgatccccccacttgcttgtcacccccgctcagttcgacctgatgaagctgtttgaggtcggtggcaacccggccgacacgcggtatctcttcctcggcgactacgtcgaccgtggctactacagtgtcgaggtgcgcctctgcttgcgtcgccgccaccgcgcttctgctattggccccgactgacgctgtgcgttcacctctcgcagtgcgtcttgtacctctgggcgctcaagatccactacccagactcgctctacctcttgcgcggcaaccacgagtgccggcatctcaccgacgtgcgtcgcggcctgagctctgttgccctgtgccagtgctgacccgccagcctgatcgcccgcctcgcagtacttcacctttaagctcgagtgtgcgtcgtgtcgatcggatcggatcgagacgtagagcgctgacgccttcgcgcccgccaacctcactcccctctgcagccaagcacaagtactcggagaacttttacaacgtctgcatggagtcgttctgcaacctgccgctggcggccgtcatgaacaagcagtttctctgcgtccacggtggtctctcgcctgagctcaacacgcttgatgacctcaagacggtgcggcctcgtgccttcgcttggtctctctctgccttgcgatgtattgaccgcctggtgcccctcctcccgaacgcagatcaaccgtttccgcgagccgccgacgcacggcctcatgtgcgacctcctgtgggcggacccgctcgaggactttggcaacgagacgggcaacgaatccttcatccacaatcacgtccgcggttgctcgtacttctttacgtacaaggctgcctgcgactttctcgagcgcaacaacctgctctcggtcatccgcgcgcacgaggcccaggactctggcgtgcgtcttgccatgcggggcgaatacgcgctcagctggccctcaggctgacctacccgcccgccctttagtatcgcatgtaccgcaagaccaagacgactggcttcccggccgtcatgacgctcttttcggcgcccgactacctcgacgtctacaagaacaaggcggccgttctcaagtacgaggccaacgtcatgaatatccgccagttcaactcgagcccgcatccgtactggctgcctaactttatggacgtctttacgtggtcgctgccgttcgtcggcgagaagagtgcgtcgtctcgcctccacctcgaccccatgactcgcccccccgctgacgctgcgtcccgcctcctttgcgcccgcagtcaccgagatgctcatcagcatcctcaactgctgcacgcaggaggagctcgaggaggccgacgaggaggacgaagatgcgccggtcgagatggacgacgaggacctcgacgagaacggcgacaaccggagcgcgatcaagagtaagattctcgccgttggccgcatgagccgtgtctttgcgctcctgcgtgaggaggcagagtctggctcggagctcaagtcgatcgacggcgtgccggccaccccgaccgacacgctgaacaacggcgccgaggaggtcaaggtcatgatcaaggacttcaagggcgcgcgcacgagcgacatcgagaacgagcgcctgccgccagacatgatcgacgtttgtccccccagctctgccgtctgcctggccctagcctgccgcatccccagactgacgctcttcactactgcttgatcattcgcaggccgacgaggagtgtccggcctcgccctcgcagtcgcagcccaactcgccgtttgccgagccaacgtcgccgcccgtcttcaaccgcgacatctttggcgccgtccaggcgatggacgcgacgccgtcgagcccagcctcgaatggatcggtaacgccgccgtttggctcgcccagtggttcgcctggctcgcccaactcgccgctcggccctgacagcccgtggcggcctgggcacggccgcaagcagtcgctcgggacgaccaagacgagcccgagtacgcgccggcggagcctggagagcaccatctcattgatcaaggaggtcgtcgacgggaaggatgccgagggcgactcgatggaggtctctgagattgccgaccagctcagctccccttcgcggcaccgcgtgcgtagcaccgatctcactcagtcgacgcctgtcaccctcgctgaccactcgcgcgtccatcgcagccttccaagagcatagcttagattggacctctcttctcgcgccacctcgccgcctgaggctggccgccggtcgtcgctgctgtcggccacccacccacctcaacatcccgtcgcatcctctgcccttttgcttcgtcgcgggcctgctcgtcctcctggaagacccgccgaacgctgcctcgaagcttggcgtcgttccaacctctgtctcctttgtacgctcaagtcaaaccctcacgcaaaccggggcggacccgcgtgcgccgcccctcttcctccctttgccctgtactctctagcaccagcacgaactctcaccctgggcctctccgccctgtgcacccttgatctatgccatcaggatggaattctgaccgacatttctcgcgacaggtgcgccagacgtcaaggcaagtgcgcagtttcgtccgtcggtcggagccgaaacagaaggcgcttggctcgcctcccgttcagccctcatcgccttgctcccggccatcacctccagcatcgcctgcctcactcgcccaggtccgtcgagagcactgctagacctgaccttttggctagaccacttacccaaagcccgttcgcccaccgcgacagctccctaccactaagctcagccccagccctgccgactcgacctcgacctcgaccgcgggtccgccaggctcaacctctccctctacggccagccccagctcagtctcacagccgctgagaagtgatttgttgcttcgcgaggctcgctcaacttgtcgaaaagattgacacgatcctcgctgcaagctccggttccctcagctcgcctgccacgccgcccaagctcaccccaaccgatgctgggcatgagctcttcaaagacccgaccaacgacatcctgctatgctcggccgacaagatcacctttccgttccggaagctgcatctcgagtcggcctcggaggtcttcgagggcatgctcgacgcaggactcgagggtccgcgcaagaaacggggcagtagcgcagcgtcctccgccctcgaggtcgtcgacctagtagaagaggccaaggtgttcgagaagtatctcatgtttatccatccacacgaggaaggtccagtcatcgagacatacgaggaacttgagctgtacgtcctttgcccagatgctgcagtgggagagcactggctgacgagatggaaagactggctgcttgcccgcaggcttgctgccgccgccgacaagtacgcgaccagggctgctctgctcgcgattcttggtcagggcgagcgttttctttcgaagcacgctccagctctcttcgccctgggcgtcatttacgagccaccccgcctggcggcgcttgcgctccgtgcgttcggcgacacaaaaggcggcaaagagccgcgcttcgcgatgacacatgttccgtacgacctctggttgtgactccctccagcagccacacggtacctcttgctcaagtagtgtgaaatctatgacgaaggccacatcagattgtgggcccctgatgcggacaaagtcgaagaggtgagttgcagttctcgcttacgaggacgggcgcctcgctgatcctcagatttctttccctacttcagtcaggcttcgtttccttcctttatgaagaagctgcaaaagtgtgtcctccactgaaccagtccgccgatggaccacgatcgcgctgacggctggcctgatgaccacagaaaccgtttcgacgacctcgacgccggcctgccctcgacttgagattaagtctgcccgggcattctctctccctgtacgcccgccgtcggggtttgatcacgacagtaatccctcgcggaaactgctgtcaccctggagcccgcgccgtcaggcttgacgtgtgttgcttccgtctctctgtgtcgctttgcaacgtcgcccttccgatcccactactttgacttcgttcaatcacccgcgaggacgagaagcaagtggcccgtcatcgaggcgacgcacgagcctccccttttcgcgagggtgctgctgcgcggatggttaaagggggccgcgagcttggccttccctttcttcctctcgctcgaccatcatcccgtccttgaagttgctcgaagaggtgtcggtcaaagcttctgctcgagctcaggtcaaccctgccgtcgctgatgccctcgtcgctgcgtcccatgcgtgccagcagccgaacggtcgcccaccaactctgccactccccgagcctccccttcgcttgagcgctcggccggtaagctcctgcccttgctgacatctagcgactgcacaagcgaaagaagcaaggatgctgaaccgccatctgctttgtcatgacccgcctgcagactccgcccgaagctcaagcatgtccgcccagtcgcctgcgacggcaggcttgcctaagctgggcaccgccgccgccagctttcagccacgccatcttccgcgagacaagctttcttcaacaacgtcatacttcgttcggtggacggcgaaaacttccgctttcgtcgggcttacctccaggcggcgttacgggtgttggaaggcctcttttctttcgcggcagcgcccgatgcgaccggcacgcgcacgaactcgtcggacgcgccgatcgtcgacctcaccgacgatggcagcacgcttgagaacctcctgctcttccttcgcccgcgggacgacagtccccggctggagacgtacgacgagctcgagcggttcgtcagcggtcgtcggggccccgacgcctcctgccaacgtctcgtcctcagcccctgactactctcatgctctcgtttcctttcgccgcgtgcgcaggctctgcgacatcgccgacaagtacgccgcaacggacgtcatcaagattgcctcggcggatgcgaccggcccgctgattagcaagtatgcgcccgagctcctagcgctcgcactcatctaccgtgtcccgacggtcgcctcgctcgccctgaaggcgttcgacagcccttacatctgccagcaggagcattgcgactgcatgcaggacatggacccatcggacaggacgcctgtgttcagtctcgacgaaaccttcttcaagctcgtcttgcgtatcccagcggccgtcctcgttcttctgtaccgccaccagaccagctgcgtcgacacctggttgggaggcggctcgtggtggcggcttgcgcggtcgatgctcgaggtcagccagtattgccgcaagagccaccctcaaccgtcgcggtgctgaagctgacacgctggaccgccctcaatgcaggacgactggtacgagaagctaggcgacaagctggccgaggaagatgccgtgaatcacaagcggcgcaagctgtctccaccaacaccactaacaccaccaacaccgacggcggccgagagcaaaccactgcctagccggcggcgccaggaagccccaatgcctgagcccccggcccctccagccgacgcatcagcggccgctcccggcccgcatgacctctccttacgatcgatgatccttgcctgcgcgtagcagctccccttaagtcgaagtgctgggtgggtagaccaagggcatgagatggcgaggcccttctcggagggtgaggcccaaggtcaaactggcagcgacttgatgagggcgacctgcgacacgcagcggaaagtaccggcgcggcaaagaggcggctggtggtaagaagtactcgacgtccgacaaatcgtcagtccaatgggctcggcggctgcgcgggtctgaccccgagcggccttgcaggatcggccgatgtctaggctgggcgatgagccggccagccgacgacgccgtgctcagctcgagagctgcgctggctcccggacgcaggcgctgcgagacgacgccagggtggccagcttgcgcgcgcctgtactcgccggcatagagtaaggtagccggggccactagaggtcaaaacggtgcgcgtcggtggccgaggcgttcaagcgagctcgacctttcgggcggatgcgatggccgatgtaggtggtgaaggtgacgacgcaggcggtgcaggatcaagcatctggtttagcgcgagcgtgacctcctcgagcaaccgttctgcagatggtcgcggagcgcagcaggagcgtcagccgaagcgttggtggcaggagggatctcgcctggcgatgacgcacctgcttccctggcagccaccgcgtactcttcgttgacgacgtccgccgcggcttgtagcgcgcctagccgacgctcgtgggccgcgccgccgtccgtctcgcgctcgggcaggacgccgacgaggtactcgacctgcttggccttgcgcacgaggtcggccaggagctcgcgcttcgaggcctcgacgaccgcacgcgagtcggcgtgaggcgacttgaaggtgacgggcaggtcggggtggagcggctggaaggacggtcgagtcgtgaggtacgaaagtgtcgcggaggcgatggtcaagagctgggtgggacacaagcaggcagggtgcatcagtcagcggagccggaaggacaagcagggcgatgccgactcacgtcctcgatggcgtcctgcagctgggtcaatctgtccatgtccctagagggcggacgacgttgtcgaaggtcagcgagggagtcgtcgggcgtgcttacgtgccgaaggagggacgactgacgacgagaggtctgcggcggcaggagcatcagcatcgtcgcagggctgcgcatgagatcgcagggaaggcaaaccgaccttgctgcatgcctcacgagccggcgcgagctggaaaggggcgaatgagctagctggcaggtgctggtcgttggaggtcgagccatcagcaaaggcaggcgggttgtcggcgagcgggcgggcgggcgacgaggggcccgatcccggcttgggaaatgcaacccatgttggtcctttccccaccggcgcgttgcgcgggctcatctatgctccgccgcctggcgacgcgtccttcgacccttcactcgccctctccctctcctctcgctctctccacaggcatctagcgtgtgacctcgccgcgccttatactccttcagcgtctagccttctcgctgaactcggccagcatctccctccacgagagcacgcgtccatcgcgagtctgcgcttgcgtcgcgtcgtccctccctcccttctcctccaccacccctcatcccatcgcccggcatgacccgccggaccgctgctgccgcacttgcagcacgcgaaatttcgtcgccggagcccgaggacgcgccgccggccgccagcacgagcaaggcggccgccagtaacgggggctacaagctccagttcgcggacgcgctcttgcccaagtcgggtgctgcctcgtcctcggacgcgctcctccgcaagctcaaggcgctccatgccgagctgtcggactcggagctcgacatcgatgcgctcgacctgagctcgtttgagcaggttaaggatgacctcatccggcgcgagatcctctgccataaggacccgggcgtcaaggcgtttgcggcgtgctgcatcgccgacctgctccggttctatgcgcccgacgcgccctactcgcccgctcaggtcgaagacatctttgccttctttctcaacctgctcgcgggcgcgctccggccgacgcgctactttacccaggcgcccgtcgctgcagcggcggggtcgtcggcaagccgccaggcggccgagacgcggagctctgccccaacgctgccgccgaccaagaacgagtactacgctcagtacttctacctcgtcgagagcgttgcgacctgcaagtcgatcatcctctgcctcgacgccgaggagcagcggctcggccaggccggagccgacgagtcgggctccgtccgccgatgctttgaggtcttctttgacgttgtccggtgcgcgcctccttacctgcacgatctcttccttaccctcgactgaccctgcgctttacgaaacaggtacgacctcccgcggacgctgaccgaccacatggtcgacattctcgcgaccctcatcgatgagtgcgcggcgctcgcgcccgagctccgcaacctcctcctccgccaattcgacacgagccgggtcgactttagccagcgagcgctcgacatggccgtcagcgtctgtagcttcgagtatccgatgcagaagctcgagcggagcttcgcgcaggtgccgccttccctgatcgcgttcgcctgagtcggcgaccaaagtctgacgttcgattggctctctctctcttacagtacttcatggaggtcctgctctcgcccggaggcgccagcaggagtagcagcaagtccaagagtgctggccggtcaaacggcgccaagggcaaaggcaaacgcaaaagtgccttcaccggcgacgacgacacgtccgaggaggagcccgatgacgaggacgacgaactcgacgacgatgaggacgatgaggacgcccggccgaccaagcggcggactggcgccaacagcagcggctcgtcggccgggccgacgctcgaggcgacgcacgtgcttctccggtcaatcgtctctcacgcgcctctgacgctcctgacgacgatccctgttctcgagtcggagctcgagaacccgctcctcccgaatcggctgtctgcggtcgagacgcttggcgcgatctggaacgtcccgcggccgctcggggccgagctcgtcgccaaggccggcaagagttgggccgcctgggtccggcggggccgcgaccgcgaatggcgcatccgcaaggcgtgggtcgagaagctcggtggcctcctgcgcgtcgctggcggacctggcggtggtggcggtgtcgacgtcaagggtgtcgtcgagcgtgcgtcgtttcttgcctcggctttctctcagccgccgccctcgacactgaccgcgccgcctttctgcgcaaccttgtagcgcacctgcggctcaagatcaaggacccagacgaccgtgtacgcgaggcgacgtgccggctctttggccggctcgagtacgagacggcgcggcatcacgtcgcgcgtgaaacgctggtcgcgcttgccgatcggctccaggataagaagattgccgtacgggcggcggcggtccactcgatggcccggctctacagccttgcttcgtccgaaatgtgcgtttcgggactctcgtgcgagactgcgccgtcgctgacctgccgtctccgccttcgtagcgacgacaacgaggagaatgcgacgcggctctttggctggatgccagacaagctccttcactcggctcgtttaacgtcgcctcccgtccggtacgtcgctgtgctccggaacttcgcctcattctgagtttgctcaaacgacgctctcaccgtcgcagcgagatcatcgagcacgcgctctacgagcacatcctgccgctgccgccaaagggggacgacgccatcctctggaccgacaagctcttgctcgtcctccgctcgttggccgagccccagaagcgctcgctcctcgcgctcgccggcttcagccaggcccgagccaactatgcgcttttcgtgcgggcgtgcgaggagtggaatggcggtaccgtcgacgacaaccaggacgaggtccggcgccgcaaggacggcatctttaagggcctcagcggtgcgttgccccccttcacgcctacttttcgccatcgccagtagctgattctgagccttgcctgcctctcgtgctctgcaggccagtttccggacccagcaaaggcaaaggccgacatggacgaatttgccgacgccaacgagaaccgactgataaagctgctcaagggcgcgatggacccgcagacggaactcaagacgctcgtcaagatcaacgtccgtcccgctagactatcagccatgcccaagccgagaggttgacttgctctctcgcgctatctacagaccgaattcgcccgccggtgccagccaaatctgcttgcgacactctccatcatcctccgccgcggctccttcccctgcattaatcggtcgtcggtccccacgctactcaagcggctccagcggatcacgcctacgacgacgctctccggcctccccgcgtcggccgccgactcggccgtcccggacgaggtgttgtacgccaacgctgcgaacgcccggctcgtactcgagacgatcgcaaagaccctgccggcgatgtttaaggcccacgtgagcgagctccagcggcttgttctcggcacagcggcgacgccaacggatgacgacggcgacgacatggttgtcgacacggcggcgacggcagagaaggttgacgttgccgaggtccctcttcaggcgctggcacacctcgcccgggccgatgcgagccttcagccgtcggatcggtgcgtccttatcggcctgacttatccgctttggccgtgactgatagtttcaccgctgtaggaaactcctcgagcgtacgatggcctacgctgtgaagggcaatgcccgacaggccaagtttgccgcccgactgctcgcctactcgacgcaggccgacaccctcacggtctctctggccaaggtgcgcccgtcgtctgctttgtgccggtttgtcggcctgaccaccgaccccttccttcttgcagacgctggccggccggctcgacggcgtgacagacatccagctggaggccacgatggtcgggcttgccgagcttggccggtccgctccagacgcgctcgagggccagagccagatcgtctttgcgttcatcctgcgcgtgtttgccaaggacgacgcccggcttgagggcatgaccgaggacgaaatcgacgaggtgacgcgcgagtgggttgaggacgccgacctcacgagtcgggcccgggccaagcttgcctcgctcaagctctgtgtcaaccgcagcctgagccatgcccagaccgacagcgcggtcgaggtcgtcgcgccggtcctcaagatgctcctgacgatcctcaccaagcgcggtttctttgtcgacgaggccgacgggtgcggactttctaaccactttcgaacgtctacaggacaacgacgctgacactccgctcttccacctccttacagcgtgccgcttcacgcccgcatccgcctccaggcgagcaggtcgctgctgaagctcgcgcggtccgccaactatggcgacctcatcaagcccaactttctcatcctcgccgtccaggtccaggacccgtgcttctttgtccggcagagcttcatccggaaacttaccgagtacctgcgcttgcaccggcttcactatgactttaccgtcatgctctacctcgccgcccacgatgaggacgagatcacggcgctcgtccgagcccagatcaagcagctcgtcgacgtctcggcccggacatccgacggccgccagcgccagctcctcgtctacggctttgtccggctcatccacctgctcgctcatcacccagactactcgaagcagcctgaggacctgctgttgaccgtcaagtacctcgacttcttcctcgacatcatcgcgaccaaggacaatgtctcgctcctctacgcgctcgcgtccaaggtcaagacggtccgcgaccgcgacgccgactacgatgaggtgcggaacggcctcttcgtgtgctaccggcccggcccccgctgactcttcgctcgaccccttcctcttcagaacatctacgtcgtcggcgagctcgccatgcacacgatccagcgccggaccaagacgcaccactggacgctggacacgtacccaggccacatcaagatgcctggcgacctctttcggccaatggccgacaaggacgacgttcacaagaaccggatccgcgtctacctgccagacgagacgctcaaggcgctgcgcgagaccaaggtgcgtcagacgggggcaaagttggcgatcctgcctctctgtgactgacactcgctttgctcgcaggctcccgctccgacaaggaaagagaaggaggagaagcctgccggcaccaagcgcaagcgcacgacgaccaagtgcgtgctttctcgccctcttcgctccactcgcgctgaaacctccctgcctccattctcaggcgtgccaagacgaaggccggcgcctcggacgacgaggatgaagagtcagacctgtcggagcccccgaccgaggacgaggaggccgcggcgtccgagccagagcccgtcaagaagccccggccgaagcctaaggcacggacgaccaaggccaaggccaaggcgcccacttcggacgaggacgacgagatggaggaggacgaggagccgcactcggacgtgctgatgatgggcgaggaggaggaagaggaggaggaagaggaggaggaggaggttctcggccgcggagggaggcggcggccggcatcgaaggcgtccaaggtgcgcctcagcattgatccatctatcttgcccttgctgactagactcctttccattgccagcagccgccggtcaagtcgaaaggcaaagcctgatgctggcccgctctgttagggtgccgccggcttgggcgtgcggcgccgcttgcctgccagcggaggccgcctgcctgatctctctgatgactgtcacgaacgtcggcaaagcaggcgtacgcagcaggcgcgaaggtctggccggtgcttgggagagacgaaatctgctctgcggcagataatgcgcttgctgctttacctctgagggacagaggcagcacgcgacgcaagggcgatgctcacgtttcttcggcagcagccaatcaagcatagtcgtcgttatcgtctccaatccgacgtcatccagcgacacagcatggctggcccgcctagacgacaaactcggccacctcgagaaggccggcaaaggtaacctttgagatgctcttgatctggtcgaggtcgaagttggcccgccgactgagatcgcccgagttgtggtagaaggggtcgacgatcggaccattgcgctcaaagacctgggtcgaagggaagccgaaagcgttgcttgactgatgatcggagcagcaggcggcggtggtgccgacgacgagctcgggcgagtagatgccggccagcttggcgagcaggtcggccgcagcgggcgagccgatcctgcaggcagacgaaaaagcatcagcagtcagcaacgaggtttgccagcctgaatccgaaccctgaagacgcacaactctgggaaacccaactgcatcggctcgttctcctcgtggtagccgagcatgtctccctgaatgtgcagcaggaccgttgcgttttgctcatggagcttcttgaagtgggcgtgcgagccgagcaggccctgctcctcgccggcaaagaaggccaaagtcgcctgagagcagaaaggggcgatcagctcggccgacgccggcaagacctcgcgcgacgcaagagcgcgcacctggtgcttgaaacccttgatgcctgagaccttgatcgcccgagcgatggcgaggacggagcccgaacctgagccgtcatcgtcggcgccgggcgcgtgggtcgagccgaacgagccacgggactgcgggacagggagaagggtcgcacgatcagcgacgtcctcggggatcgctgcgcaaccgaggggatcgcacgtcatagtggccgctaatgatgacgcgcttgacatccttctcctccttgcgaccaccaaggatcggatagtggcagatgacgtttggcgcaaagccgacaagaaacggctcgagcgtgcagttggcgccggtcgactcgacctgctccttgagatggtgagcggcgacgacggccccggtcgagaacgagtggcgcgagaggatcgggccttgacacgagacgttgaggagggggtcggtcaggaaagccagcgaagcttatcggggcaatgcgggcacgcactctctggggcctcgcccgtcagccattcgatgtccttctcgagctgcttgatcgagagcgactggaccatctcgtcaaccttgggcgaaaatttgaggtgcttagtgctgtcgaggcgtcgataagacggtcagctcgactggcgattgcgagcaagagtcggccggcgtcatgccactcacatcgcctcgaggtagtcgatgcgatccttcggcacgccgtcgagctgagacgggtacccctcgcgtggaacgacgaccgggacgaggaaggacggcaggaacaggtcgaggaccggcaggagcgcgggcgagacgtgggccatgaccgcagacgtcttgccatcgaccgagccagagagctccgtcaggatctcgagcgccatctggccgcctcccagaccggcgccggcctcggtcccaagaggcgattggccagcagcagcatcactagatgcgtatgtcgcgccgacgagcgattgctggtaggtctcaatgcgcgacgtgaggctctcgagctcgaggtccttgaagccgcgggcaacggcgtcgtcggagaggccctcgacgccggcatggccgatccagacgaggctccactcctcggcgcttgaagcggcctgacggggcggctctcccgggttcacgacgtcgtagatgaaggttgcgtcctcagctgagccgccgtagacaccgcggaaggtcgcctggtcggcgtcgaccgggtcgagggcggtgcttcggaagtgcaggcccgaggcgagaggctcgcgcgaggcgggtgccggcgagggtgccgcaagagcgagcggcagaagggctgcggcccagagcgtctgggcgatcatatcgagaacaggtcgggctgaagagggaggaggaggagatggggtcggggaggcaggcaggcaagggggcgaggcgagagcccacgcgtcgcggcgagcgccgaagatgtcggagccaaaatctgcttccgaggctcaggcgtcgagacgacgacgacgacggcgagacgagatgctctggttgacgctcactctccttgaacagctccctccagccagcatgacttttgcgataccgtcgagctcgggctcgcagctgccgctcgcgttggacgagctcaacgcgctcaagcacgccgtcatcggcaacccgaggcgaaaagccgacgtcctcgccgacgacgcgctcgttcagcggtacgtccctggcgtcttgcttgccgtcgcttcgccttaagttggagatcactgacgcaaccctctccaggctggtcgctcaatgccgggcagaactgggcgaggacttgaacgcgcgcgcgagtcgactcgaggccgtcatcgtccttggctcactctcgcatggtcagaccccccttacgcacgcgtccgacgaggagcaggtcctgacgcccctctgttccccacacaccctcctgcagccggcaagcaggcgatgccgacgctgctcgtccttcccgacctcctgccgaatcttctctcgtcgctgcgggctgcgctccccgcattcagtggcccctcatcggcgcagccgacagcagcgtctgtcgacctgaaggctttgacggtcgtcctccagagtctcgccaactccgtcggcgcaatgcacggactcctcacgagcggtcgctggggctcgggtcttggcggggatgagcaaaacggcagcgcacagagtgaggcgactcgtatcgagtggcgcagcgcgctcggccgccaggtctacgacttcctgctcgtgagtcgattatcttctgtgctgcagggaaccttaaaagtctttagttgacattgtttctcaccgccttacaggacggtgcgacaacagacctgcttacgctgctcccagcccttcctgcgtgcagcagcgaggacgccgcctcgccggtccatctgccggcgagggcactcgtctctctcctgcaactcctccacgacctcgtgagctcgcggaaggcatttcggtcgacgctgagaccggtctggagcttcaagggcaaagagcgagcagcgcaagacgagagcgacatggaggttgacgacttgggcttcaaacggaggagtaggtgggtcctcaatcgggtcgagggtgtcctccagacgacgctcgcagcggccaagaacgcgaggggcgaccaatcaaaggtcggtcggcaacaacatatctgcacgtaccgaggctaatcgagtcgtccccctctgcctgaaaggccatccgggcggcattcaggctcgtggccgtcgcggggcctggtatcccgtcggccgtcctcgatgatgccgtacgagcaggctttgcacatccagatgagggcgtccgcttcggtgccgcctacttgttcgtcttcttttccctctgcctgcccttgcatcgccggtcatcgttgatcgatccttcgtgttggcaagcaggttctcaagcacggtctcgcgcgctcgggagacgcctcttcctatcgaggccttcgcaagatacttcaccgtcctcctcgggctttgggcagacatcgccttgcctctgacggcgtcagcttcagctgctgcggcatctgcaatgtcgacagactcgcccgacaaggcagttgccaaggtcatgagggaagaccagatccaggccgtcttccaactgagtgcgtgcttgctcgtgacgggccacgtgcggactcgaagctcatcaatttctcccttcatcagcccacgtcgttcccggcagggtccaagttcatgcactcatggccgagatgggcgtcttgcgccggatgggcgagctcctcggcgtcggctctggcaacgatgtcgagtggcgcgagactcacgggacgccaccgggctcaaatcttggatcgagagacgatgcctctgacgagctcaagctcggcgaggaggaccgcgagagccacgcgaggctccgcgagggcctgctcttgacatttgccgccgtcgcgctctcatcaacgcagcatcacgccgccctcgtgcttttgccgggcctcatgcggtcgacgctcgcctctctcggccatccgacggcatccatcagggccgcggcgtgccagctggtccgagggctctctcgcaacgtcggcatcttgcgcgagacgctcgtcgactcgggcgtcggccagccgctcgtcgccattctcaaggggaactacggcgtcgatggccgtgagcgggaggaggtgctggccggcgcgctcgctgcggcggcgaacctcctgctcgatctcagtccgatgaaggaggtgcgtatcgctcgaccaatgaacgcgtttgcttccctttgaccgccctaacgtgcgacccttgccccgtcgtcgagcagaccttgctgcaagccgagattctgccgtgcatcgtcgcctacgcccagaagccctgggcggctgacgtccgactgaatgcactctgggcgctcaaggtgcgacgcgactgacttgaacctgctgtgcttgcggctgattcttcgaccttcttgctttcccagaactttgcttaccgcgctagccagcgccaccggctccggctgctggagagcctctctgcgctgcagtacgaccccgatgtgttgtcttcccttgacgagttcgcggccgctgatgtcgaactttctcgcttagccttcccgacgtcgactgggcacaagacagcgagtcggaggaggcaaaggaggtggctaacctgctaggcaacctgctcatcggcgccgactctgtggtccaacaggcggctctgccactcctgcagtcttcgacgctcgacgccttcctctcggctgcgacggcggccaagccgatgactgaggcctcgcgggccgcgttcgtcgaggtcagaccgctgtggcctccttccgcgcgtgcgagacgagagacgctgacgcagtgacggccgacggtgcacaggtttgccctctgatccgctacattcacgaggctcagccgaccaaggcaggcgatccgagaagcatgccttgcacgcgcaggctactgcaccatgccgcctccgcccttgtccgtgccttcccacccttaacgacgatcgagggttcactcagctgacgcgctggctacttttgccaggagtacggcgtaccaggaacgcagctctcgcttgcccgcctgattggcacgatgatcgaagatctcaagcaggctggtcagtccgagccgggcaggtcaagggaccgcgtgtcggttgaaagctgacatctgaagacccttctacgatcccttcccgcagaccctgatcgcaacgcgcgactttttgaagaccccgacacccttagtcggctcgaggccatctgtgctcaccggccgctcgacgttggcagcggtgccgggtactcggtcacagtcctcaccgagacgctcgtctggctcgcctcttgtcttgctagggaaggggccggtgatggctcatgatggcagggtgatgtttcatgcattctgcgactctgacaacgtccggaaagctggttcgatgaaagagcaagtggagccgttcgtactcgacgtcccggcaggacgagaaatgcaccctgcgagcaagtggctggctgacgtaatcctggcctttgccttccaccgcgccgacggcttcgacctgctcgcgacgacgacgagcaaagcatgttccggctccctcctcctccagcagcagcagcagctggccagcagcagatagcacatgatgcacccctacagccgactatccagccgacgtcggtcgacagcccgccagtagcagcagcagcggcggcggcgggggacgacgccggagcgcggtcgttcgtccagggcttgatggaccagaagtacgtcccctcttcccgctcctctccccttctctggccgggccgagggcgcgcggtgccgacgtcccctccgcctcgatcacagagtgagacagaggaaaggagagagggcagaagacacgaacgaaagggctgacccgtttcgccttgcactcctggctttcgcgcagtccgtacttctcggccggcgcgggactcatggtgcgtcccgtccccttctccttctccctcctttcttgcctctcgtctcgaagccggctgcttgtaatgcgcgctgggaacgggggggggggggaggaatgcttctgagagcttgggcgcggtcgttcaaaagggcctccgaggcagccagcagtagcagcagcactaccaccggtccaccgccgcctgccccctgcccaacgccccttccctcactttatcctcccgtcgcccgccctgctaacactcccctttcgcccaattggatcacagggtataaccgctctgctcgccctctcccgccggctcatcacgctcgggacgactctcggccaaaggcggctgctcgtctcgctcgagatcccctcaaaggaccacagctacccgtggttcctcgagtggatggcccacaactcagcctcctccagcagcgcaacaaccggcagctcctctctcgcctcttcaagcgccgttgctgccgccgaaggaggaggaggagggctcctcggacgcctctcagcccgcctcccatcccgcggcctcaaatcacacgagctcgccgtcgaaacctcgtacaagaagcacgagaacggctcgtccgaggccctcttttcgctcgtccccgggccgggcacgcattggttccgctataagggggcatggatgcaggtcagttttctcgaggccgcccttcgtattttcgctcgaattctttttctgacgacttgggcgtggggggtaagcttgaagggaggaaggggccgccgacgggcggcgcggtcagatttgatccgtcggctgctttgtctcggggtagggcgatgacaactttgcccgagggagggagggccgaggggtcgagcatccagggctcgggctcgttacgcggcgcgaggttcgagtcacggcccttgttacgcgcgcgcgtcgcccgagagcgagtcaaccttctgcttcggccagccagcccgcaacgacctccccttcttcccttcctccgacgtcaccctcttgcccgccatgccgatgctgtcagtgagcgcctcgtcttgctcagcctcgccttcctcgccaccgccgctcgcctgcatagctcgcggcagggccagcctctcccctccttccagccgtttcggacgccttcggcctagccgccctctgcaaccgcccaccaactcgcagctcactgaccctcggttctgcacctttcccgctcccagctccgacccctcggtcaagtacaagccctacccggcgattgacctgccgaaccgccagtggccgacgcgccggacgacgcaggcgccctactggctctcgaccgacctccgcgacggcaaccagtcgctcgccaaccgtcagtcctcgctcgttcgctcttgacccggtctttccagtcaaggcctgctggctcttgtcaggcgctctgctgccctcgcttgagtccgcgctcgcagctttatattgcagagcctcccttctcttgccgccgctcgctcaccccccgggaccaacccactaacaaccctctccctgccccttcgcaccccccttagcgatgtcgccctcgcaaaagatgaccttcttccggatgctcgttggcgtcggcttcaaggagattgaggttgcctacccggccgcgtccgacctcgactttgcgttcgtccgcaaggtcgtcgaggacagcgaggcgggcgatgacgtcttcatccaggtatgtcggccgcgatgtggtccgagggcggaggtaggagaagcgggaggaggccgtcatgctcaagcggcagtgctgcatgagctcgcgaattcagcttgccttgctgagtggaggaggtgaagagccgggctgctagctgctgcaagaggtcgctagcgcgcgcgcgtctcgatcggcgcgcacgagccgaaacggcgcgtgcaactgcgcgcttcgcccaacctatcgccaatatccctccttttcaacacgccggcgacccgacgctgacgccgcttaatcctctcccgcccaccctgcaggtcctgacgcccgcccggcccgacctcatcaagcggacgttcgaggccgtccggggcgcgaaaaacgtcatcatccacctgtacaatgccacgagcccgctcttccgccaggtcgtcttccgaaactcgaagaaggagacggtcgcgctcgcggttgagaacacgcggctgatccgacagctcgcggaagaggacgcaaaggcggtcagtcccccctgctgctcgactgctcttgctcaccgaaactgacggtgctctcctcgtcaactgctgcagcacggcaccaacttccggtacgagtactcgcccgaactctttacgcagaccgagcccgactttgcggttgaggtctgcgacgccgtccacgccgagtggtttgccggcaagggcgaggtctggggcggcaagggcgagaaagagcaccgcatcatctttgtacgtccgcgagcgtttcgcgctggccgacgggacgcgccggctgacgaagagtctgtgtctggcccctctgacagaacctgccggcgacggtcgaggtctcgacgccgaacggctacgccgaccagattgagcacttttgcacgcacgtcgccaagcgggccgacattatcgtctcgctccacccgcacaacgaccgcgggaccggaattgccgcggccgagcttggcctcctcgcgggcggcgaccggatcgagggctgcgtgctcggcaacggcgagcggaccggcaacgtcgacctcgtcacgctcgccctcaacctctatacccagggcatcaacccccaggtcgacttttccgaccttgccgccgtcatcgacgtcgtgaccgagtgcaaccagctgccgatccacccccggcacccctacgcgggcgagctcgtttttaccgccttttccggctcgcaccaagatgcgatcaagaagggtttcgaggtccgcaacggccagctgacgaaggccgagggcggagagccgggttgggatatgccgtatctgcctatcgacccggccgatgtcggcgggacgtacgaagccgtcatccgcgtcaactcgcagtcgggcaagggcgggatcgcctacattgtcaagtcgcacctcgggctcgacctgccgcggcggatgcaggtcgccttctaccaggtcatccagaagcggtccgaggagactgggctcgagctctcggtcgccgacattacctcgacatttgcgagcacgtacgccgtcccgccccatgcaacgccgaggctcttcctccgctcgttccggctcgtcgacccgtcaagcccgagcgcgtcgggcctcgcgagcccagacgagcccgggccggacgacgacgaaatttccgaccggcggcggtcgatcgtcgcccgcgtctcgatcgacggcatctcggtcgtcctcacgggcgagggcaacggacctctctcgtcgctcctcaacgccctcaaggcccacctcgagatcgacctctcggtccgcgagtattccgagcacgccgtcgacgccgcggggggtggatcagagacgaacgcagcctcgtacgtcgagctcatcgggcccgacattgacccgcgcgacaaggcccgccagggcttctggggcgtcggcatcgacggcgacatcaccggctccggtctccgcgccgtcctctcggccgcgagcgccgcgctcggcgagcgcaagattgacctttcaaagctcatggccaaggcctcggccggcaaggcctagacactgccgtccttgcctaaacgaaatgaaaaccaagcactgccctcctctatcctcgctgtccattttgtatcccctttcccctcaaaaaaacccttctcgtcgggctagagccgtatgagcatggaagtgcagccctgtcgtcgtttactttccaaagcgttcaaagagagtcaggagccagacagcaagcgacgatagcagcatgagcatcgggaggcgagtagtggaagacagcgaaaaggcgaggctaggggctggcttgtcgttcacagcttgctttgccggagcgggggcttctcgctgtcccactcctcgagccagacgttgccgagctcgtcggcgagcgtgaggccgagcgcgcgcagcttcggcgcgaccttgtgcagcctgagggtgtcacggccgtggcgggtgaggaagaggttccggtcgttgccgacggagtcgcttggctcggatcggacgacgacatggcgcaaggcaggaaggaggtcggatacggccatgacggcgtcgagcagctgctccagagaagcagggagatagtaggggctgatggcgatctcgatagactcgagcctagcgactggttcgaccaggaggcttgccagcagacttcgcatgtcgcaatgattcttcatgccaaaaatgagtcgattgacgcccggcagggcgccgacgagccagccgtgtggccggatctcaagggcggtcccgctcacccaatgagtattgacacgtgagaagcgaccgagtttgttggcaatgggcgagaagtcgacgttcggcagcatgcctaagtcgactgagttgcgcacgagatgcgaaggcgccgccacgaggagagcggaagccatggcgatgtcggcgtcggctgtcaggcagaccgacaggtgtcgaagattgccgatatcgagccatgagtggagagttgggatgatggaggcagccgtctgtgagtctgacctcagctccgcctagatgtcaagtgaacgaagcgcgggccgcaggtaatggaccggagccgagggccagccggcggcccaccgaaggttcttgatgtccatcagactgggcaggactgaaagatcttcgagaacgggcagtcggccttggtgggcgtagaagttttgtccgcgaaagtcgacctgccggaggacgttgacgatagcagcctcagccggagtgcgccgcttagcgatggccatccacatgctcccctctttccaaaaccggtcgcactcaagcgtcttgtaaagtaagggaagcgctgccgactgtcgagcaagccagatgagcagcgtcagcgccgtcgctgcggtcgagatcacaggggctacaggacgcgcgacggcgacttactgcccaagccttcgggaccagacggagacgcgcaagggtggcttgaggatgcaaggtggtacgtgacctcgagtcggcaatgatccggaggaccttcatctagagctcgactggcaccttggaagtgaaggcgtggccctggagccgaacatgaggagtcgcggagggaaggcaatggtcagtgaccggccctgctcgattcgagaagcttgaagacgttaagccaccgactcacgaggggcagagcctccatttcgatgggagcgagtgcggtagagcgtggaggagagggctaggaggaaagactgacagtgcaggagaggtggtggtcgagaggcaacggacggccgtcgcaaaggcccccccctttgtctggcggcggccgccgcgcgaacggcccctttcaactcatcgctcgtccgctctgacctcccagccgcaggccctcctctttatcctctctcagacgaacgtcgtctctctgattcgtcggatgcagatgaaacatgagctgggatgtggattgacgttataggtgagggtgtggggtgggtccgatcgtctcgaggacgtctagtcgaagacaggaaaggggtcgttaaagcaggtctgagagcgtgcaaatgaagggagtatgcggtcaggtcgaccgaagcgtcgatcggggccaggagggtacaagggaaggcgcagaggcctgaaaggacgtgaaagcctgcagcgaggcttagccacggtctgcgaggggaaagcgtggtcagtggatgtccgcagggagaagaggacaaaaaaagggacgcacagcctccgccacccgaatagcctcctccgccgctcgagtagcctccgccaccgctcgagtagcctccgccaccgctcgagtagcctcctccgccactgcctccgcctccaccacgagaataacctccgccgccgccacccgagtagccgccgcctcccgaatgccggctgccatagtcacgcggcgagctgttgttgcgcccgaatcgctcgcgagagtagcctgcgaaggaaatgcaaggtggaacatcagcgtcgagatgtcggcagagacatctgaaggagtcgacgcacttcctccgccgcggctgccgccaccgccgccgcgcgtcgaaaggccaatcttggcgaggaagctggggccaaagtggggcgcttgctgcatgccgagcgccccggtgccgaactcgcgcatgccgtcaatgatgtcagtgaccgagatgccgctcgcctggcgagccttagagaaccagccgagctgcgagccaatgacgtccgagcagacctcgtcgtcgagcttgccctgaaggttggcgacgccgtcctcaatcgtctcgaggccctcgcgaatctcggcctgctggttggacgtcaggctcgacttggcgagcgcgtcgttgatctgcgccatgaagttgtcctccgagatcttcttgacggggaaggtactcagctgactcttaatgaatggcgtctcgaacggctggagaatgatgtcgccacggccggtgttgccgccgcgaccggtccggccaacgcgatgcgtgtactgctctccatcgtcggtcgcgccaacctggatgacgcgcgtcgtgcccgggtagtcgacaccgcgtgccgagacgtccgaggtaacaaggatcgagaggccagacttgtccttgcggaactggtcggagacgcggacccggaccctctgctcgagcttcgagtggatctcgtagacgcgggttgccgatcggcccggcgtgtgggcaacgaggttcttgaggatcgtcgcaaagagctgcgtcatcttggtcgtcggcaggaagacgatgatcttcgactttccagcgttgacaatctggtcgtgcgcgaccgtccggacgagctgcgggaggagctggctcggcgtcgacagcacctgggcgtactggtcaatcttggcgaccgtctgggcctcgcccttggggacgcagtcgaggaacagggccgagtccttgagcgaggcctgagccgtccgctggatcgcctgcgagacggtcgccgagaagaggaacgtctgccggctcgcgggaaggaattcaaggatcgcttggatgtcgcgctcgaaacccatgtcgaggatcgtgtcggcctcgtcaaaaatgagctgcaaatgggacaagaggggatgggggtcaaccagaatgcgcgaggggctgagctagagcgaaaggggcgtaccgtctcgaggccggagaacgagtcggcaatgccgcggacgttctgaagcatgtccttcagccgaccaggggtagcgacgacaaagtccttgcggtccttgttgaagtggcggatctgatcgcgctttgactcgccgccaacccagaggtgcgagcccccgttccagcccgggtgttgcgacgtaagcgcgcgcgactcgaccgcaatctggctcgcgagctctcgcgtcggcgaaataacgagcgtgccaaccgagcgatgggcatgctcgcggccgttctgggcgcacgaggcgatacgcgactcgagcgcgggagtgaggaaggcaatcgtcttgcccgttccagtccgggccttgacgaggaggtcccgcttgccgccatcaattccgtggggcccgtccaggccgacgaggtcaggcagcaggccgaggacccgctcttggacactcgacatattggtgaaattgaacggccggcccgtgagcgcgcgcagcgtgttcggatctatcttgccttcgagcgtggcaaatggcatgccgacctgggtctcctcgacagcctcctccgagagcgggtggtccggcgcgaggttgacctgctcaaaccgcggccgcgaggtcgagagggaccggagggctggaggcagcgcggtgtggtggagggaggtgaggagcgcggatcggcggaaatgggcagaggcggcggatgaagcaggaagcagatacgcgagtaggattgaagcagcaggtcagccaagccgctcgtcttcgaaaggataggctagctgccacattagagcacgcaccgacggagggcaggatcgagggtgcgagccgggcgcttagcgctgcggtcgccctcggggcagcgaggagcgacgcggcccgttgcggccgggcgaaccgggaggcaatggagcggagcatgcgaccgagcagagggagcagaaggagaggagaagaaatctgacgaggcggacggatgacggaggtgctagtcgacaaggcaagtagtcggctcgcggtcgtgctgcgtcgtcaaagcggcgcggcccgccgcatgcccgagaatcgaaattcagccgtcggaggcaaattcacccgtcggccacctgcgcgcagaccgcacctcgccgccgacctcaactcctgctcctcctcacctcactctgcagccttttcgaccatgcccaagtcctcctcctcggccacgagccggccgtcgaagtcgcgcatcgcaggctccaagcggtcgtcctcctcaatcactgccgccgcgagcagcagcaagacgcctgccgccgccgccgcagcgccctgctcccagccggccaaaggcaagaaggcagccgccagcaagcagcacaccggcgtcatcctcgagccgccgcagggcaagcagctcgcatcgaccgagaaaattatccgggacgcggctatcaagcagctcgccgcctttctctcgcaggccggcgacggcgagggcggcggcggcggccggctcaacgaggcggaaatgcgcaagctgtggaagggcctcttttactgtgcgtcgttaaggctcgtgtatgacggtggatgacctcgctgaccgctcgtgctggtcgtcacacaggcttctggatgtcggacaagccgctcgtccagcaggggcttgcgtctgagctgtcggcgctcgtcctttcaatcgagcccgtctcgtccgagtcgctccaggaccggacgctcatcgcgctcgacttcgtcgccggcttctgggagtgcctcgttcgcgagtgggcgggcatcgaccggctgaggtgcgtaccccagcttctgtgtccaaatactggtgcctcggctgatcaacctccccgcgcgcccttactctcttcccctgctcgtccccgcaggctcgacaagtactacatgtttatccgacgcttcacgcacgcctgcttcctcctcctccgccgggcgtcgtacgcgccgtcctgcgttgaaaaattcaacggcatcctgctcgagggcccactttcgtacacgcgccagggcgtgccgccctcgctctcgtggcacctggccgacatctacctcgcagagtttgcgacctcactccagacgccgacaccgccgcctgctgccgatggagcggccaagccgacgacgttcgtcccggcgctgtttgagccgttcgtccgggcctgcctgcacacgaaccacgcgacgacgttcaagcggctggtcgactcggccctgacgccgctcgtcggcgcgctggctggcgagggtgccgggctcgatggcctcaaggcgctcgacgagagggaggccgtccgggcttcggtcatgcagatggtttggcgtgagagcggcaaggagagctgccggcccgagaagcggcgctcggtcctcatctggtggaaggaccagggtgggggcgaggacgatgagtagcaggaggaagtgcgctacctcatgttcctcccctctcactgtcgtcgcggcgcgaaaagtcggacccgagcaggaaggacagctgagaagcatcatgactaggcagcggcaacgacatcgaggatggccttgccgaggccgttgagcgcctcgcgccggctggctccaagcttgacgaccacctcgacaacgagatcgtccctgacctgtgaaagggataaaggtcagccttctatggtcagcagtcgggagttggcaagaggggacgaaccccggctgacgccagcgacggcagcgtcttgcgcagctccttgagcgtcttggccgagccgaccttctcggcctgctgtttgagtcgggctgccatcgacctgagtgctgagcctgcggggtcagtcgccgagcgcgtcttctgtttcgcgagaaggagtcggcgctttggtcagacgggggtcgctaagcgagacaagttggcagcgatccacgcacactggatggcaggaccttgaccagcagcttcagcagagcaaagccctgaaaaagtgcgaaagttcgcgtcagtcatccgcctcaactcggaggaacagcagagacaaagacagcgcacgtcaagagcgactgcagcgtgatgcagcgcgagccatggcggcgactgatcgtcttgcagagtcgcgctcagccgatccgactgctcgccgaagaagcgcttgatctcgtcgaccgacggctgccctttgcaggaggcgagcgaggctttgtccgaccagatgagcagtgctgttgcaaaggcgacgagggcctgctcgtcgatcgtcagctgtaagggagacagccgtcgtcagtgctcgtgcgctgctgatcaaaaggctgaaaattgactgacgctacccgcatcctcgggggtctggatgccgttggcagacgacgatgtctgattgggtgacctttctaggccctgcagccgctcggcctgatgaaagaccctcgagtaggccgagcgcatttgcttcacccatgaggcctgagaaggaccaaccattgcaaggtcagattagacgattcaggcaggccggtcagcgaggcgctttacgcacgtccactctcgggccagcgtcgagcagcgtctcaatctcgaccgcgcctccaggctggtagctcggcacgagcttgaaatcgcggttgtccgcgagtgagccggtgggcagcttgccgaggctgacgttcgtctgtttgaccgttgccgactcgtaagcctcgccggtcggcacgagcaggaactgcttgctgtactcgagctggagcacctggcgttggagcgaggtcgaaaggcgccggagataggtgccaatgtcggcgacctgggggtagacctcgttggagagcgcaacgacgagttgctcggcgtcctgccgaccgattgaagcgtcagcctggacgagcgttacgtgagacggtcgacgtatcacgtacggctccgaccgtctgcttgaaccaggcggttcccttgccggtacgagcgaggagactctccgggtctgaggcgaggccgtcgccaactgcaaaggtgctggtgcgagtggtgatgaagtgcgagagggtgtcatggaggacgtgatcgaccttaagcgcctggaagcaaggcttggcgagggatggggcggctaggagaagcgagtcggtcaggaggctggaaggcgcggcctgctcgcgagagtgttaaactgaccaaggagccgatagatgcggatcaggagcagacggaagtagtggttcatcgtgctcgacttctgggcgtgctccaggaggaggatggcttgtatcaggtgcgtcgggtcggctgcaacagcggaacgtagaacgtcgtcagcgtaaggtggatcacagtaacagaaaccagcaacgtactcgactgcgaccatcggctgacgaggatgttgacgacgatgatgacgaggtcgtcgacgggctgtagctcgtctgcattcagctttgaccctgtaggtcaaatgaacgtcatttagtgacttaagaggggagaatctggagccggcataaggggcgcaccaaacggcaggccctggacgtaaatctccttgcagcggtcgacgatccagtcggatgccgccacgtctgacggctcggagagatgctgcaggatcttcagggcgttggctctgccgcgaacgtcgtccagagacgtctggaggaaacacaggtcggtcagcctgatgacaatgctcatcatgggggccccgacgcaccatctccttctcgaggtcgaccctgagaaaatccctcagcggttctgcctctgtcgccgaggtcggcaggaagggccgcaggtcctcaaacagacacggcttgccagagaagcggcgaaagtaggcctggagcgcatcggctgggcggatgaaaggaaaggctgatcagctttagatgacgatctgacgctctcgagtgacgtactggatgccgcatcacccgacggcaactccttcccaagatgcagcagcgccagccacgggcctcgctcattccccgcgttgcactccgacagttcgacgaaaaacgagtgagcctgggaccgcagcgagtcgtccttctcgcggagaagacccgtcagggcgataaggttcagatgcagctgaaagttgtcctctctgcagcgtagaagcgagtgagtcgttgtgcaacaggctgagatattgagcctgacactcacgcaggcgttccctcgctgccagcgatcctcgaccgaagagtcgcccactcagacgaccagatgctggcgtccgacttgccgagcgccttgacgacctcccaacgcacgaggtcgacctcgaggttgccgccgcccatgcgcttggcctcttccgactcgaggaagtcccatgcctcccgcagcacctcgacccgcgtctcgtcttcgccatccagcgtctccgccaggccaaggaggacgctgacctttagccagatgtgcgagggagacgaggtagagtggcccgcgggagtcttaagaagggcctgagcgagggtgtagatcagcttgaggttcttcggcgccggcgtcgcgcgggcttgggcgagcatcgcaaagattgaccacgagtaagggcgagggtcgtcctcgagcaagctatggagccgaaaagcaatctgaggatgtgtatgaaggcgtcagccagctacggtgggcaaggctgaagttctgcttgtcggccgtcgcaccttctggacacccggccagtcctgccggcggacgaacgccatgcacagttgctgcgaccgtgaaccaagctcgggatcagcttgcaggttagtgcaggcaggatcgcagacagaaaacgaacgagaccgagtgaaccattttgcggcgcacggtcaaaggcgctctcatagagcctcccaatatcatcggctgcgcggacgaaacgcggtcgtcagcatggcctgtcaaaggagctccagccgcaggaggaggctgtctgacctcgctctaaggcagtcaaggtcacacggaggtagcctagggcgtcttccgagtcgacggggtcgcgaatgatctcgtcgacgagctgggcagcctcggcccgcttcttggagagcacgagcaggtgtgctttgatcgcctggcgtccgtgcgagctacgttagccgctagattgcgtatgcgagtcaggattgaggtagacggaccatggccacgtgcttgacgttcttcacccgcaagcgagggatgatctgcgtgcatgctcgaagaccggcggcgacgttgcggctgtcaagggcgtctgtcgcgaaggaaggagctcagcatggcaggggcggcggcatcagcagctgaaggtcgctcgtgcggacgaactgtagatgggctgtaggagtcgtgtctcggcacgctcagcggcgcttgtgctggacatgaccggcagctgcaatggcgagaaggggaagaaagcaagatgacggtcgcagggacggccagagccgcagccaccaaactccgttggctgagccggcttgcctccgtcccctcgacgtcgacctctctctttctcggcttgagccctttccgccgatgaaggtgatgtgcgtgaggcttaccctagtgcctggcatgactctgagctaatatcgtcatcgctgccccgttcccccagcatcaagtcataccaggccgtcggcgtctggcgctgggagctcggcaatgcgtccgactcgcccaagccagaggctcgcgacggcgcgtccagcgagggcgaagaatacgaggacgaggacgaggacgaggacgacgtctgtggcatctgccaggcgccttacgatgggacgtgccccgattgcaaggtgcccggggacgactgcccgctgagtgcgtccgccggctgttgacctcgcgacgcgccctccccctcgcctcctaagcaacccagtcggctgacccgctctcaccttgcctggatacagtctggggccagtgcacgcacgtctttcacatgcactgcctcctcaagtggatcgacactgagtcgagcaagggccagtgcccgatggaccgccggccgtggggtgcgttgcgtgcaggcggcgtcgcccctcgtccgtcactgaagcgtcgcccccatctgacgctgatcttttgcccgctgtttcgaccttttgatagtcactgctgaacggagctgagcgctctcgatgcgagaacgttggcacctccagatcggtcaaccggtccgctgcggctctgctgcgcctaccggcgacagggaacgcaagagtctccttgacctgaactatcatccaaaagcctgcagaccattcaatcctccgcctcctggtctgctctcgccagggcaatctgaagccccttcaaaagcgaccagttactcgatctgcgtcggcgccccttcacccgcgtttctcgccgcctctccaccgcatcgctcgcagtggtcccggtctcgcagattcccttcggcaggctggatatccgatccaccccagaccgcagacggctatgtcgccactgcccccatcgccaaagggtgagcggtccgccatctgcgtgttccgagaggcgagaggagaccagcagggacgcacgtgtgccacctccttcttacgtcatggcgagacgaccgtgtcagacgattgcgatgcctttctgccttgcctaccttgcgtctgagagtcgtgttcgtggagagagcgagtggcatggtcggctgcgcggcggcgagcaaagtgcatctgtcgttccgtcggagttgaaactccgccggctctgcgtcttcgcacggcggcggcggccggcaaatcctttgcggctggctcgccctcttcctctgacccctctcgtcgacgtacaaacgtgagatttagcatcccttgccctcgctgtccggccacagagggacactcgtgctgaccaccctgccctttccttttccttagttcgtgagtctcttttccgctgcagacctgccgagcgtgccaaagttgggcgtcgagagagctgctcgagtgagaaggagcctggtcgtgcgacgagctgccctctgctcagctgcgtcgatctgcctcgaagttcgagccgcttcgcggccgatgcctgtgcctcagcgagcggcctcggcggcccgcggtcgccttgccggctcagcaggtatcgggccagcaactgacccttgctcttcgccttgcctccagttactcgctccaacttcaccctcaagatgtccgttgctgtccagaccttcggtaagaagaagaccgccaccgcggtcgcccacgccacccctggccgtggtctcgtccgtcttaacggccagcccatctcgctcgccgagcctgcgctcctccggttcgtctcgccctgccttgtcctgtctcggcctttgagcttgacgctgacgctgcctcattcccctatcgctgccaggtacaagtactacgagcccatcctcgtcgtcggccaggacaagatcgccaacatggacatccgcctcaaggtcaagggcggaggacacgtctcgcaggtttacgccgtccgccaggcgatcggcaaggccatcgtcgccttctacgccaagaacgtcgacgccgcctcggccatcgacctcaagaagacgctcgtcgcctacgaccggactctcctcattgccgacccccgtcgcatggagcccaagaagttcggcggacccggcgctcgcgcccgtgtccagaaggtccgccccccgcgctcacggctcttgcgctcagctcggccgctgacttgcctcctatctacagtcgtaccgttgaagagctgctgttcgtgtctcgccaaagggtgagttcctttcccagctcgtctctactctccatgtccgcccactcttcgcgagtgcagcttttccaggctcggcgcggtttgactgacccagaaggtacacctgtcgaaactcgtttcgctgctgtcgctcttcttttgtcgctcttgcctgtcgccccccctgcagacctttgcccggtcccttcgcgatgcgtgtgcttgctttcgatacgatctcatggccctgccagaacgtcttgcttcgcgcctagcctcggatcggaaagactcgtttgttcgcaaagctgtatgagttgccgtggccgcccctcatgcgacgtcatagtcccgatagagagcgagtggtcagcgagagatgcaccggtgtcggccttcccctttcgacgggcagcgagctgcgcagacgacgtccagacaaccactgtccaccaccctctgaccacctatcagcccttcgtctcaagccatcctcatcgagcgtctccaaagatgctccgagcagcgctcccccgcctcggccggatccggacgcctcgcccaccaccggcagagcccgtctggccgccagaggccgaggaggagtcggtcccgttccggcagcttcccgaggctgtcactcgggcggccaccttctcatcgtcgtcccctctctccgaggcgccttcggcggcaaacgagagaacagaggtcgaagaggcggaggacggcacggcagaggttcctgtccaccgagcaacgcgctgggaggtcctggccaaacgacgagctgttcgtccccgctcatacgaaaggcatccatcgtcgctcgagggcccgcttggctgatgatatgcgatctgcattttctctgtgctctacagggctcgcaattcctcgactacatgcatctgacgatccgcggcggccgtggtggcgacggcagcgttgccttctcgtgagtcggagctcgcctgctccggcttcccccccccccttccgcttctgtccatcgccatattgagttgccgctgcgccccctgccaacagaaagctgcctcaccgacgagactcgcgcggtcctccctcgggcggcgccggaggcgaaggcggggcgatttacatccaggcgagcgacgagctccttagcctcaacacgctcgtccgcaacgtcaagggcaagacaggcggcaacggcatgggcgattgccagaagggcaagaagggcgaggcgaccatcgtacgttggtctcttgatgactggcagtctggacgaggctgatctctggagcccttgcatgctcgcgccccgcctgcagatcaaggtgcccccagggacgatgatccgccagatctcgcgcactgtccatcgagtcctgacgcccgaagaggaagccttaccgccatcggagcgtgacccaatcgtgatggaccggctgctcatcatccacccgcaggctcggcagaccaactactcggacattcccccgccaccaatcacgcccgcgcacaagtacgggacaaccatccacggcacgcccaggccgccgccgccgccgatcgacctcgatctgtcggtcggcatgaacgaggccgttcttctctgccgtggtgggcgtggcggcgagggcaacgtcagcttcggcttgcacgacaaggatcgccagagcctctttgcgcgccggggcgaggtgccggacgagatcaagctcgagctagagctccgtctattggcagacgtcgggctactcggcgcgccgaacgcaggcaagaggtgggtttctcgtcctcttctttgagtttgaccttgtgccgccgctgacctgcctcgcctctctcacagcacgctgctgcaggccctcacctcatcaaagcctcagatcgcgtcgtatcagttcacgacaacgaaccccaacatcggcctttgccgcatcctcggcgacggcacggtcgcctcagcacccactacaccacaatcgctcgagacgcctgagcgcaacgtctcgttcgacgagcccgtcgcgccggtcgtcaaggtgccgctgaccgagtcactgcccgtccgagccgagggctggcgctcggcccacggccggcggggccggatcgcaaagcacgatgaggctctccgcttcaagatctgcgacaacccgggcctgatccgcgactcgcacctgaatcgcgggctcggccaccagttcctcctctcaatctcgcgctcaccgatccttgtgctcgtcctcgacttctcgcttccgacggccaagctccttgagcaggccgacatgctcctctcggaggttcggctgttcgagcccgagacaaagctgcacgagcgcgtccggctcgtcgttgccaataaggctgatctcgtgcgcgacgaggcgcagggccggcggcgcgcgtcggcgctgcgcaagtgggcctggaagaatctcggcacgcgctcgcacaccgacgaggagacgggcgagacgtatacgcttggcgacaagatcgacgtcaagatcaagctcctgagcggcaagtgggggcagggaatccgcgagctcgcatttgagatgggcgagatggtcgtcgagcagcgggaggccgaccggctcgaggctgaggagcggcgccggagggagcgtgaggaagaggaggagatcattcgcgagctgcaggtcaaggtcggtcccctttctctgcctcgtctcgacagcctgctgctctctgctgaatgctcgcttgcttgcctgcccgaccagatcctcactatcgacgacgtgccagcccggccgccgcggatcggctacggcctcatcgacgagaaaacggacctgccggacgacagtatatcgagatgagcgtgtcgtcgcaacgctgcgagcgggtcgtatcgagacttgcaaggtcgtgcacatactgggtcgcgcaggcaggtggagggcagggcacggagtaggaaagcgatcgagcgtcatctgctggacatcgctagggttagcctcccgcgggcagacaggcactttgcctcggcccagcctcatctctctcccttctcctctcctctacccttcacccctttcaagccgctcaacccatgtcgtccaaccaggacaacacgccgaccaccggcggggccatcgccaacccgagcaccgaacaccaccagcacaccggctacgacgagcgccaccaggtgccgacgatccagaattagttgcgtcgcctccagcttgcccgccgcctcatctgggtcgcccggctgacaccgtctgctcgcccgccagcctttcccgccgcgatgaggagcacaaggacaactgggacaagggcctctcggaggaggagcttcagcgggccaaggacgaggaggccgatcgggccctccgcgagcaggaggacgacaaggacgcgatcatgaagcgcatgcagcccagcaagagcaagccgaccgacgaggtgcgtgagctacctggtgcgtttgctgaagagaaggacaggagctgacgacaagctcttgcccgcgacgacaggtcaaggagcgcaagggcgagcgcactgtcaaagacccgacgaccggccacgccgtcaccatcaaggacgccgagttcaagggtgcgtgctgtgtggaactcgacgtgctgccccgcctaccaacgctgacaagaccatctcctcttctctcagactaccccgagaagaacgagatgagcgcgatccagccggctccgagcaaggcctctgtccaccactcgcggacggcgccgtcgccggcctcgccgactaacatctcgctcctgccgttcccacctgcggcgccgatggcgctcggctcgacgatcgccgccctccagaacctcgcatacttctcgatctttgcgtccttcatcctctggctgctcatcgccttccgccacggcttctggaactttgccttccggaccgccctctgcgtcggctttggcgccggcggaagcttctacgcctggaaggccgcccgcggcgtcgagaaggagaccgagaaggtccgctgggagatgcaccgccagcgggctgagaagtttgcgccgccgttccctgagtcggtcgagtggctcaatgccctgattgagaccttctggggcctgtgagttcgagtctgccgtcgccccccctgtctgactgctgccgctgacagattgccccgctcccgccagcgttaacccggagatgttcctctcgactggtgcgtctgtgctggcctcagcttgtgctcgccctggctgactagcagcctcgcttttgctagccgacatggtcgaggacatcatgcaggcctcgctgcccgcgctcgtcgacgccgttcgcatctcggacatcggccgtgcgtcggtggtcgtcgcttcgttgtcgactgagctgattctaaccgaccttgctaccgacgacagagggcaccaaccccttccggatcatctcgatgcgcggcctgccggaccaccctaccgactccaagtgcgtcacgtcctgaggttgcgagcgatcgcgcatcggctgatcagcaagctgcttctccaggtacccgcgcgaggagtggatcgaccagggagacgccgagcgtgcgccgggcttcagcaaccagcaggaggccgccaactctgaccaggccggagactacgtcgttcgtccagtattcagtgcctcagagtttcgccccgagtgctgacttcagctcacacgtctgctcggccccagaatctcgaggtcgccttcgcttacagcgccaagcctggcaaggacgaggactcgcgtagcaagaacatccacctcctgctcgaattcttcattggtgcctttgagtgcgaccctcgccctcctcctctccagcagagcgggccctgactgaatcttctggcttcccctcccagctggctgcacatccctagttcgtcccagaactcgcctgcgtcgcaagcgccgctgctgacctgctccgcaccagtcccgctctggatccaggtcgagagccttgtcggcaccgtccgcctccgcctgcagtttatccccgtcttcccttacgtccgcaactgcaccttcaccttcatgggcgtcgtgcgtccttcttgctgctctcgagctgcgttacaggcgttgactaaaccgctcctgccgccgttgccagcctgctgtcgaggtttccgttgtcccgatgactcgcggtacgtatctgtgctgtctgctcaatgtttctcccctagctgacttgtccgcgcgcgcttgcagccctgcccaacgtcctcgacctgccgatggtctcatccttcgtcaagatggcgatcgccgccggcacggccgagtttgtcgccccgaagagcatgacgctcaacctgcaggagatgctttcgggcgccgccatcggaggttcgtcggtgttactcaggtgcagcttgaaatcgcttctgacctcgtcacctgccgccgaccagacacccaggccatcggtgcctttgtcgtcacgatccactacggcgaggacctctctgctcaggaccgcaacggccagtcggacccttacattgtgtccgtagccgccgctgtcctctgtcgcttcgtcactcacggtctgacgagcgtcggtcttcttgcagcctcgcctacgccaaatttggcaagccgctctactcgacccgcatcatccttggcgatctcaaccgtgcgtcactcctaggccccttggtgttgacagggagattgacccaaccccctcatttgccagccgtttacgaggagacctgcgtcctactcctcacggccgacgaggtcaagtcggaggaggctctctcgcttatgctctgggactctgacgagcacacgagcgacgacctcattggccgcgtcaaagtcgacgtcaaggagctcatgaaggagcccaacgtcacccaccgccgggccgacccgctcatgggcttcgaggacgccgacaagatgcagggcaagctccactggtcggtcggctactacgagaaggccgctctcaacccgaagctcgagattcccgaggagcacccggccgtccagccgtccaagacgctgcccgagatggagatgcggccgggagacgccgcgcccaacccggccgccaaggatggcccgccgccgctaccctcgccagagcgcaccccgttcgttttcgtgcggagctctcgttcctctcatgctcaactgacctctggctcccgtaatcagaccagacacccgctggaagtctggcatcctcagtgtcgtcatccatcagatcaacaatcttgaaaagcgcaatctcaagggcacgtccggcaaggagcgcgagggtgtcgccggccaggacacggacgagccttctgagcagacggccaacctgccgagcgcctactgcgagattgtcatcaacgacgaccttgtctacaagacgcgcgttaagcagtacacaacgatgcccttcttcgaggtgggtcgatcttgcttgaagtttaagcttcgccgggctgagtctgccttgcttctcctctcgcgcaggccggaacggagaaattcatccgcaattttgaggatgccattgtccgcatcgtcggtcagtgtcgccgactgttatcccaggccgacctgccgctgatgtttgctgcccctctgcagtccgtgactctgccctccgcgagaaggacccgatcctcggcatcgtcaacctccccctcaagaagctctttgccgaggcctccgaggtcacgcgcatgttctcgcttgaggagggccagggcttcggccgcgtcaacatctcgcttctcttccgcccgctcaaggttgacctgccgcccgtgtgtccctccgctctgctctagctttcggctgctcacttcgtagctgactctgttacttcgcccgcctcagaacatgctcggctgggagactggcactgtcgaaattacggcgccctgcgtcatcgagctcgacccggcgcacacggatctgatcgacgacttcaagaagctgacgctttcgacgagcgactcgaccgagcacctcaccaagaaggaggccagcatcagcggcaaccgcattgagtgggacgtcggccgcatccgcctccgtgagtgcgacctgtcgtgcttgcgcaaatgcttcgactgacgaccctttgtcccccatcccgattgctagccgtctactcgcgcttccagtcggtcctcacgatccaagcgatgggcagcgcccacctcggcatcctcggctccgaggccaaggcgctcgccgtcctctggctgcaggagctcgtcgacgacgaggagcgcgtcattcgcatcccggtcctcaagtccaagaacctcaagcagctgcggcagaacgtcagtccccgcctcgcttcagtcttgagtgaagcagcgactgagcctgcaagatcttttgctcctcagtacatcaacgagttcacgcagaagacgcacgactacgagattgtacgtctcgtgtctgtcccttcgttcttttccgcacccaagctgatctcagccccttcgctcttcctacaggtcggctggcttacgaccaagtaggtcgcccgctttctgtcgaacagggagacgctctcacctgacatctgctcctcttcccccttccttgcagggtcaagcttgacgccggtctcgacgaggaccacgaggcggcggctgccaacggccccgctggctcgcaggcgcgccggcatgcgctcgagacctgggaccggatcgagggtcaggccgagcttgccgagcgcaacgctcacgccaacgacgacggccacatcgacaaggacgaagccaaggcgatcaagaaggccaacaagcgccaggaccgcaaccaccagcgcggcgtccattcgttcaagcccttccggtgcgttgcgacgtatgcctatagatccagacccagacgggaatctgaccctgctatcgtccgtacttgccctgcaggaccgcgcgctggatggccgagggcgtcaaggagcggctgacgcctcacaaggactcgtccaagcgcgagcgtgcgttccctggccaattgacctggctcccctccttcactcgctgacgctcttcacccgtgctccccctttgcagctaccgtccagtcggaggcttaaccgtccgactgcttctctttctcaaaagcctttatactcatacgcttgcactcgcctctctggacattcacgccccgtcacgctctggctcgccctttcccagaccacgtcccatacctcctcgcgaaatcttgttttctgtagcgccagctcctgcgatgaacatgtagcccctctgccgactgatggcgagaacgacatcaggtgaagctgggcggcgacttgacacaccgtggcggcgattgacctcctcgagccggcctcatccgccgccgcagctcgttcgacgttcaccatcaacatctgcccgcccttcatgcaaggttcgagtctcctcctccttctctccctatgtgctggcagggcgtcatgctgatcgatgccggctcgcaggcctcctgtcgtactcggacgacgaggacgagcagctgccgcaactgagtcctcggcagccggtcgccagcgcctcctcctccgccagctcgtcggccggcgctcttcgtcgaccagctgctcatccgtcatcgtcgtcaaagctcgctctcaagcaccagctgcccaacctcgtccgccgcccgatgacctctggaggagcgcagacagggccgtcaggggctgggccctcggcagccggcgcgccgccattctccaactcgcccctgcgtcggtcgttcgacccctcgccaggcacgacgccgacacgctcgccgctcgcaggagacgaggccgacgagctggaggacgatggtgagctcgtccggcaactgctgagacctccgccgctcaaggatggcgagggctgggaggacgagtacggcctgcgacggctcggcgaggaggctcggatgatgtccagacaggttgaccccgccctgcaggtgtgtcgcagccagacggtcgcctctcacaaccttgactgacgctgtcactcggcattctgacgtattcctccagcacaaggtctcgacctttatcgccctcaagcagcaagggacgcacttcaacgactcgttgatgaagtcgcgctcgttccgcaacccgaccatctacaagaagctcgtcgagtttgtcgacgttgacgagcgacgtggtctggcacccagcatctggggctgggaggtgggagagcgtgagcgctggacgaccaagcgcatcagcgacatgcaaaaggagcggagcgaacgccttacggccagccaggaggctggcaagcgggatcgcattggcttcacctcctcgtcggtctcatcgagtcggccgccctactcggcaaaacccaagcggccgccggtcccggccccgccctccgcaccgacggctgccgccgtgcccagcggtggcaaggcctactcgctcatcggcgtcagcggcgaggaccttgttgcgctcggtgagaagggcggtcgcgaccgagacgggaacgatggaaagcggaaacgggagaaaacaaccggcggcgaaaagtatggtcgatgaggctgcgcttgctgcttttttccggtcgtcggctgccgggcgttacaacatatctatctcaggggctttaggttgatgcgagggatcagatggggaccgtcaagaccatcttttggtgttccgtgccttcctgcagcagtggatgttgtcaggataagcgtcagcgcaggagcggagagtgtggataccgagctgtgtggactaacctcaagaaagcgctcgccaacagatcggtagccgagctgcaagcgcgagaaggggagtaagtcagtgcgctcaccgaggacggacaatggtggtggctccggatgcaagggcctaaccttctcgtagaagccgacgacgtaggcctgcgaagcaagccgggttagcgcgtgaaccgtacagcagcggcgagactgcgagagagagcgacgtacctgagcgtggcacgagacctgcacctcctgctcgccccgctccatgcctgctcgaaccgcgtagtccttgacggcccggacgagggaggcgccaaggcggtacttgcgggattccgggagcacacaaagccggccgagctgtgcgaggagagggataagcggacggattagcctaggcccagcactgagcatgcggtatggagaccgcgcctttgaccgagaagggaggaagcgaacggtacccatgggcgagctcgttgcggtctctacgagcaggaagtggacgcagtctttgtcgtcgctgggcgggcagcaaagagggcacccagcagcgtcagccgataggtctagtttttcaggatttaagctcaaggccgtactcgtcctgctcgtcgtctgcgagtcgggtcgagcgaggtcagggttgagtggttgaggttgagagctgctggcgtcagttgcggccgggagctcccctcataaagttcaagctgacctcggctgtagccttgttcatcgcagaagactaatgagaacgccagtcgaccaccgaggcgagaacgggcaccgggagcatcgaagtacacgtcaggtcaagctgtgggccgacgggcgctcggaggcgacggacccttgtaccggatcgccatggcctgctgcagctcggcctcgctcgcaatcttgatgatgtgaaagtcgtccgagacgaccttgaagggcttgccagctgctgccatcgtgctgtgaggatgaggaagatggtaggcgtcgtgggcgacggagatgagggttgacgttgacgcgcaagcgcctgctggctgcgtcggtcgacccgctgccgcccctgcgttgccacacgctgccgaggaacacctcaggttaaggttggattgagtacgagttgcggagatcctaaagcgtgtgcggatggtggagagcatgcaagacggcctttcagggacggtgatagctctgttcaagagtcgggcttagcgggtgctaggagccgcactgcgcgaggctcctgacgatgcacacgactaatcatgagacacatgtgatccagttgtatgtaacatcgtgaagttgtaagagaagggcctgatcttgtaaaagatggggggagggggttgttttagggttcttttagggtgtaacgggcatgcaatgacgaaagcgggtctatgaacgggaggccaagagttcgagagttagacgagaggaggagacggaagcagaggaagggagcgcaacttagaaggcgaaaaagcgagcacgcgcccggagaagtgagagggagaggaggcgggagaagagaccgtacgacggcatgagggcgcgccagtggtcgaagagggggacagaggcgggggagagggtgccggcggtagagagaacgagagggaagaaaggggtggcggtgctaccgaggtacttggaccgcttcagatccggcgctaccagaagtcgaccgagctcctgatccgcaagctgcccttccagcggctcgtccgcgagatcgcccaggacttcaagaccgacctccgcttccagtcgtcggccgtcatggcccttcaggaggcctccgaggcctacctcgtctcgctctttgaggacaccaacctcgctgccatccacgccaagcgcgtcaccatccagcccaaggacctccagctcgctcgccgccttcggggagagcgtgcgtctcattgtctcgcctgccttctcgtctgccgtggctgaccttttcgccctctctttttctaggctaatctgctcgtccggtctcgatcgacgccgctctgcgctgcctcctcccaccttcgcttgcctatcccttccctcctgtccgggggtctggcccccttccctcccttcgcgtttttgctctctcatgctgttgtttcaggacctgttctgcgtgtgcgcaagcgggatcgtcagcaaatgatgtgagtgtcagagcctcgagcagtgtgcactcgtcgtccttcgccgagaaacaagtcgtatgaagggccatggagcgggccaccggtttggtctgactgctgccgtcgtctctcgaaactctcggctgacgcaggacatgtcatgctggtgtgatgctatcgccaccctctcgccttcgccgcctcgtcctcgagttccgccaccgcaaaggctgccgtccgactcaatcctgggtagacccggccgagcgtctctgcgtcaggcagtcgcgcagtcgatgccgtcctcgtcgtcgtcgctgcaggccgccatggtacaacctgaccagcagctcaagcttgtcagcggccagacgcaagccctcaggcggcaagacgcaccttgctcgattgcagcgccctgtgttgctcttcggctctccgcttcccgtcggcccatgccctggcgtttgcctggacgcgcagcttctcctccttcttctctcgcttccgcgccgcctttatctcctgtgcgagcgccttggccgccgctttctgagccttagccgcgtccttctgtgcgcgatcggccgtctccgcgtctttcttggcttgccgacgggcggccttctctgcttcggcgaatgccttcgcccagatcttgtcgtcggaggctggaggcatccgattgagcgtacgagagagatgcgaaagctggtgggtgtcagtgggtcagcctcactacggcggtcagctggcaagtaggtcaacgttgggcggccggatcctccttgcggcgaacaaaaggagtcgccaagctgagccgcccggcgacaaagggcgaccgagaagtgtcgtgactggtcatgcatcgctcgcgccgtgcctcactcggccaggccctcgtcgccggcgacgtcgtccaccatcttgcgccagcggcgctggacctcgatcgactccttgtagatcgcaaacttgacgtcgaacagtgccatctccttgttgccggcctcggggacaatacgcttgccggcgggcgtcatgtcgatctacatgcggaagagatcgtcagcgtcagcggtgaaagggcagcgcagaagcgcgacacgcaccataatctcccagaggcgctccttcatctgcttgccagcctgcttggcctgcttcatgctcgtaatctccttgccgccgaggacctcgcgcacctcggctgcgtaccggccgagcattgcagagcccgaaacgacggcagccgatgatgacggcggcaggacgacaggcacgcggcagatggacgagaggatcgacatgagccgggcgttcttgacctggccgcctgtaaagcagacaaggagcgacgtcagccactgggcgaacgggacgacaagtcggcaacgcaccagacatatagatcgagtcgaccttgtgacctttctcgttcatctcctcgagaatgtgccgcgtctggagggcgatcgactgcgggcccggcggtggcgaagtgtcagcccggcgccagacccagccaatgtcgaacggcgcacctcgagcgtgacgttgaaacgcagagcgaggtcgcttaggttgctgtcgagggcgatgccggtcatcatgccgcgctgcaagccgcgagagagaagtcggtcagtaaacggcgacggaggtcgtggtcctgacgagagggccgcaccatgcgagggtcggccaacgggctacggtttccgtgcagctggagaaggtatcggacggcgtgtgagtattctggcgtatgcctcgagcgcagcgtatcagtgacgtacgtcggggtacaggtgtagatcccgcgtcaggtgggtcagcgtctcgcacccgcgagcgacgcgcatctcctcgagcttgtcgccgagaacgtcaaacatgttgcggttctggtcctttgcgagctgctggagctgcgggtaggccgggtgcgtcttgatcataaagtcgatcagctggccggtcgacgactggccgccctcgttcatccaccagccggggaagctgcgagaagcgatggagtcagcaccgagctcaatcggtgaggtgggtcgcagtcggccttacattgcgttcttgtagggaccccagacgccgtcgacaaagacgccctcgggcgactggacgatgtggcacgtgctcgtgccggcgacggcggccaggcggtggcccgactcctggagtgcgggccgtttgagcgtcttgagcgtctcagccgggttctcgtcgtgagcgtcggtcgagagggcggcgacagtgccgatccagccggcgtaggcgtcgatgacggcgctgccgacagctgtgccgggcagcagaccgagctccttcgccgcctgctcgctgaggcccgagccgacgggcataccggcctgcagatcagacgtatgagaagccggtcagcgggtaaccggccatactcggaacatgagtcacttaccgtcaggacaagcgcttcgccctcctcgcggccctccttgatgctcagcttctcgccggtcttgccgccaatctgaccgagcccgcgctcgacgagctcgccgagaccgacctgctgcaagaagtcggcgttccagccctcgctcttggggtggctgcccgccgactcgtgtgcgtctatcggaatgtagctaaacttgcagacgagcgagttggccgagcgcgcctggtgctgggtcgcccggtacgtgactggccaagggtactggtgtcagcaaggcctcgacaaggatacgtgttccgctaaaggaccaacggtagtcgggcaggtcaaagaattggcagttgcggaatcgctcgggatccatgtgcttcttgagccagagcgtcttcggaatctccatctcgagctgcgggagcaaagggcggtatcgtcagctcggagcataaagccatcagaccacctacaggcccgacatcgcagttgatgcccatcttccagcccggcgggaagtcgagaccgtcgaaccaccgcctctggggtgaacgcgaggcggtgtcccggcgaaggcttaggacaaccctccctcaggctgcaattcggcaacagcgagcactcacgctcatagtcccgccgacatagtcgaggacgacgctgccggattcgttgatgagcttggcctcgtcttcggcacggtggtctgcgcgccgcaagtgtgacgtcgttagtacctcaagtctccgagccaaacccttggcagggccacctaccagcccagaggatgaccgagtggtccgagccgacgtcgccacccttggccagtccgaggtcggcgccctttgtgacttcggccggccggccgtccaggtcggtgacgacgagcgagcacgttgcgtcaaagccgacgcccttgaccgccgcccggtcgacgcccgagtcacgtaggacgtcgttcgaggccttgcagatggccgaccagatgtcggtcgccgactgctcaaagacccggtggtcctgcgggtcgcgataggtgatcgtctcgtaggccgactcggcgctgcgcggggcgggacgaccggcaaggtcggatcagccgaaggcggtcggacgaagccgatcagctcgctcgagacgcacaggagctcgccagattgcgagaggagggcggcccgtgcagagccggtgccgacgtcgacgccaaggtagtacgacatgctggagaacgggcgtgggggtttaagagaatgcgagagccggaggaagtgatggagctgcaggagggaagcggcgaccaggcacgaccggcggcggtgtcagccctctcatccctctgagcctcttgcaagcttcagataaactcacgtatccgtcaggaaggacaaaggaaggcaagggtgtgcaggcgaagtggtgatgggagaagggtcggacctgacacggcaggccacttttgggagcttcaacggccgaagcggccagcggtgggagccggttgctccgcgcgcggctgggcagcgacttcggctcggcgacaagtgcacatagggccgtcgccgtctcttctcactttttcctgtccactgccagcccttacacagttcatcttcttacggcatggcattcattcatgtcgcgagccagtcgacaccgagcccgacgccacggaggacccgctcgatgctctcgcgcacctcgctctcgccctcgtcggcctcgagcagctggtcctcgtcgacgtcgaggtccgaaaacgcgagctcctcgagcagcggcatccggcggcgggcaaaccgcgatgcaaactcagtcgcgtcctgcgtcttgacggccgctgggagggcgagcgtctggagccggcggtgcgagagccgggcgagagagacgaccgggtgggccgccgggaggacgaggttccggaggttgggcgcggcgtagaggagcgactggacgtcctcgaccgagaggttggtgtactccatgtcgagatggcgcgtgttgcagagattggtgaagaagggggcgaacggccggcggacaaagaccgacatgagcgtcaaatctctgacattcccgccgctcatgaggccgctgacgtcgagcgggatctcggcctcgcccttgatggtcaagatccggagggccgagaggtcgagccagcgcgtcaagacggtcggctcgtcgaggtgctggtcgctctggtggatcgtcaggtggatgagcttcggccggacggccggcggcgggacgagcaggtcgtcaaagagcgccgggctgagcgggaggccgacaatccggatgaggttcgggaaccggtcgaggtggaggaggacgagctggtgatgcgtctgcgggaggtcgctccgagtaaagatgaacgagaaaacgtcggccccgagcgacggccggcggatgcactcgtagagaaagcgtcggagcaggtcggcatcggccgcgccgtcaatgtggacgagccgggcgatcaaaggtgaggcaaagtgctgcgcagagaagagtcgggtcgtcagtggcggggacgagacgtagcaacgagacgagacacggaggaagtggagtgacatggaactggcgcgagacctggcaggcgcggatgagcgtcctccggacctgcttgagctttgcaggcgaggcgacccatggccagagcggagggtagccgaggtcgtcaaagacgcgctgctggacttcgagtggaagcgacgtaaagctcgccggcgacttgctggtgctgctggtgctgctggtgctgctgctggagacggagagacgcgtcgaacggggtcagcctacgacgacgagaacgctacgcctgacgggcagacgcacctcttgctctcggacatcccgttgctcgtcggttgcaggtagagtcgctgtcgtcaggatggatgcacgaaaaaggaatggccttgaatcgtcgccggcaccgagggcggctggagtgtagccgagtgcgggggagtcgtcgggggaatcgagacgagctgcctcgacgacgaccgccggccatcatctcctcgttacctcgcccgacagtagccatgcccatcaagatcatcgtcacgggtgcctcgggcgtcctcggccgagccgtcatgcgcgtgctcgaggcagaggacgacgtcgacggtccgtcctatcttccctgaccatcggagggtggtttacccgggcggctttcgaggccgacgacgaccaacgacctgacgctcccttctgtccttcttgcttactgctgctgttttcctcgctgcttcatggtctgggcgacgcagtcaagggtctcgcttactcgcgctcgtcgcagagcttgacgaagcttaacctcgtcgacgctgatgccgtcaagtcgtacctcgaggctgagcggccggccggtacgtgccccctccaacgacgaaggcgcagcacgccgcctgcctcttccgccgcacccctccaacgctcgctaggtgctgatcttcaatcgaaccttgcgctgctcgctgaacctcaggtgtcatccactgtgcggccgagcgccgacccgacgctgccgccgccgaccccgaggccgcccgcaagctcaatgccggcgtgcccgagacgctcgcaaagctcgcggccgagctcgactatcggctcgtgtacatctcaaccgactgtaggtcggacgtttcgcgcggcaggctcttctcgtttcccgaaggctgatgggccttccgcacggtcgctacagacgtctttgacggaacggcgtgcgtcgctcggcctctaaacagcgcacacatctctgactgacgctgcctcgcctcgccgctcgctcgatcacagcccgccctacaagccctccgacaagccaaacccgcttaatttctacggcgagacaaaggcggccggcgaggcggccgtcctcgcccactcggccgggaagggcatgacgcttcgggtgccaatcctgtgagtcctctcttgcctcgtcggacgacgtggctgccctcgttgcatgctgcggcgtgtgtgatggtctggctgactctggctgacaatggctgacaagtgtctgtcggcctgcgccaggtatggcgagacggagtacaactcggagacggccgtcaacgtcctgctcgacgtcgttcaggaccagagcggaaagacgtacaagagtgggtcgttttcagctgtccttacatcttcgctgatcatcatactgacgctcttcgcccctcgatgttctattgtgccgcgcctgctcgctcgtgctgcgcatttgcagtggacgcctaccagtcccgcctcccgaccaacgtcgacgacgtcgctcgcatcctcctccaaatcgcccgccgcttccctcctcgggcgatcgacgcccctgccgccctgcatttctcgagccggcggccgttcaacaagtacgaaatgtgccgggcgatcgcagaggctctcggcggcgtgtcgattgagcacgtcagggaggaccgaaacaagccgacggatggcgtcgtccggcctgaggtgcgtctctactcagactgcgctcttgacgatctgacaagacgatctaaccgactaccgtctcgacctgctgcaggacacgacgctctcgaccgattgcctcgccgagcacggcctcgtctgggaggagcgcgtgccgtttgagcagtggtggaccgagtacctggcaagccggcaggcctgagaccttttatataagatgtgctcgtacttgctctgagggcggaagtgctcagtgcgaaggcggcctgcaggggacttagacggaattgatgattcgaggtcgacggagccttgctggcccggcgccgcggccgcgtctggcaggcctccgattcgcctcgcttcgcctcctcctccttgccctgtcgtcgtcgttcctccttccttcttcctccctcccagcatgtccgccctccgctccgccacccggttcatcaacacgcccgtcgccccggcaaccctccggggctcggtcccgctcgcccagaaggcgctcaacatgaacctcgccccgaggcacgacgatcaccacgggcccaccgccggctcccgcgtcggtacgccccgtccgtttgctctcaagttcggccggggctcgtcgacgatcggcgtcaacggtcagtcgcagacgccctcgactgcgacctgctggcgagtggggagagggggagggaaggccgaaggcgaagggcagcaggagggacggatcgaggcgtcgcccgcggaaaggcgacgaggccggttggccagcctggccgccgtgctcgcccggcctcggaaaagtcgcctcgcgcaagcccagcgcttcgcgtcacccgcacgaggcggctgcaggtctttgcaggctggccgagcagccagccgacgcgtcgcggtggtcgcagggcggcgaggcggcatcgggaggtcgagcaggcgacgctctcggcatgcggttgtgcaatgagcccagctcgcacacaccctcctcgagcagctctcacgagccttctgcttcagcccgaatcgtctcaccgcccacacgccgtggcgcctccccgcgccaacccccttccttgccgatcttggagagcaggcgctgacccgtcttctttccccttctgtgcccgatccgcctggccagccccgtcgtcggccccccaccgccggtccttcacctcctcccccccggctgcccgtgaccccgttgcgacgcccgacttcacgaagtaccggacgtcgaacccggccgtcacccgcaacgtctcgtacttcatggtcggctcgatgggtgtcctttcggccgcggccgccaagtcgaccgtcgtcgacctcgtctcgaccctgtcggcctcggcggacgtccttgcgctcgctaagctcgaggtcgccatgtcgtcgattcccgagggcaagaacgtcattgtcaaggtacgtcggttgactgcgggcttcgcagccgctgcacacagcgctgacgcctcttttgctctctcgcctgtctacagtggcgtggaaagcccgtcttcatccgccaccggactgcagacgagatcgccgaggccaacgctgtcgacgtcaagtcgctccgtgaccctcaggaggactctgaccgcacccagcagcccgagtggtgcgtctccgctatcccgcgtccctccccttctgccgctcgaggctgaccggagctcattcctgtcttccctcgttttaggctcgtcatggtcggcgtctgcactcacctcggctgcgtccccatcggtgaggccggtgacttcggcggatggttctgcccgtgccacggatcgcactacgacatctccggccggatccgtcgtggccctgctcctgtcggtcccctttgttcacgttgtctctcagcgctctttgctgacgcctttgcgctccgcctcgcctgcagctcaacctcgagatccccgagtacgtcatcgacgacggcgagggcatcatcaccgtcggttaaagcgtgaatcggggggtcggaaagagggctcgcctgcaattctctctgtttctttcattctagagcgcttggaggcttgagcgggtttttgcagaggagaggggtcaaggtgtggtctgaacggacggcgtggaacgagtgccgatgggccaaagggtggtccaacactctgctggcgtagagaccttatctgtcgcaccggtcgattgatgagcagtgattttccttgaggctgctgtcaaaagagctggctgtcggcagagagcagattggacgccggcggtttggatggtgaagagacgttgacgttcgcacgacagaggttcgcgagacgatggtactttcgcaggcagcggctgctgagcgagatggtggggctctcgcacgatcctgggatagcaaggcaaggcaaagcagggtgggacgaccacgtggcgaccgcgccatgggcggcgcgcgtataggtcgagggcaagggggttagaggagagggggggggcaggagcagtacaacgggagaagtgtggccggcgacaggtgggactataacagacagacccaggtacatagagagaggagaggagcgatgagtagtaagacaggggatagagcgaccaagaagtgtccgacccacgcgagggaaggcgtctatgagtgagaaccggaaggaaagagcgcagcctcacaggccatccttttctcgaacgggcggcttgtcttccgacgtcgaggcgtccgacagcgactctgccggcgcagacatggtcgagctgacgtggagctcgtccttctcgtcccagctggcgtcgattttcggcgtctcggacggtgtgctcccgtcggccaacgacagcgtcgagggcgcgcccgtccgactcgcgacgccctgcctcggcgactggttgtggaggaggtcgggcacctggacatgaagcgattcgaggtcgggatcgttgccgagcgcattgcgaatcccgccgtacgtcgtgaccgaaatccagaatgtcgagagccggccaatatggctcgggaatgccggaacgccctgaaccggcggcgggaccggtgatgatacttggcagacggccatcgatggaaacagcttgtcgcgtgcggcgagccagagatcggcttgggtgccgaacgagaagaacatgctgcggagggaggggaacgagacggtcagcgactcaaggatggttgtttggccgacagcgtacgtcacgacgcacccaaagccaacgcaggcctgatagagggccggagcgtgcgacagcggccaagcatagcacaataccgcggtgctgcgaatgagggcgaggcagcgactgtcagtgcccggacagattgcggtcggccagggggtgaacgcacatgagaccgccagtgttgaataggccaaagaggaggacgcgaatgatgaacgggtagttgagctgcgagttttccgatgcgccaatgatgctcgtctgccgggcgatctgcctgttcttgacgaccaggacggcagcccagactgagggtcgtgaacagggcagacgtcaggcccgaaagcagagtgtacaggatatagaggaagtcgcgcaccatcgaggccgagcgcggcgaggacgatagctgcgacaaagaagtgcgagatcgtcgtcctggcgagtaaagggaccgtcagccaccattaggactgctcggcgttggaggaaggcgcgcgcacgatgatttgtcgctgtaaccgccgaggagggcgacatagagctcgtccggatgggtcgacatccatgcaaaagcgtagatcatgtctgcgagtcggggaagagtctcgtcagcacccactccagagcgaccaacaaagagtgaccggacgtactgaggaagtagacgacccaagggaagacgagcagctgatggagacggcgcgctcgtcagctctcctcctaggctagctactgggaacggtggacggacaatcatgtcgaagtgcctctcgagaggcaccttgcggccgaacgaccgctgaagcatcgcccagacgtaggccgtcgtcgaaaaggctgtgcagccaataacggtcgtaccacagagtgagaggacgtagccggcgagggcgagcggcctcgggacgggcccgtgcatcgtgttgatcctggacgagcagcggccggttgagggaggggcgggagggaggcgtgagtgatcggcggcgtgcggggctggccgggcgagcagccctctcggcctcaaaacaagcgggcagaggcgacgcaccccatcaggttggatgccgagttgagctgcatcgagaggatcatctgtatgaggcggcagaagaaagggtagattgtcagctctctgggccctctgccgacggggctcgtcggagggacgcacagtgatcacgacggtcggccgcttgacgcgtgtccaccagatgaggacgaggaccatcgtgagaagcgccatggacgtcgaatggaggatcacaaagcccctccactgctcgacctcggtccctgtcgggatccaaggtggtagcgttgacgccgacatctagcagaaacgaagcgaggcggtaagaggtcccgggctgctgccctagtggcgacggatcggcttgagctgagctgcgcgcggcgcgtcgtggctgaacagaagggcgacgaccaggacggtcagacggccgccggcgggttgacgggcgcgctggacgtacgtcggtcctcgggctgaacgattgaatggtcggtcggtcgtgatctcctcgcgaagtggggtgaagctaggggctcagacggcgcgtgtccttcattcaacaggctgcggatgcggagcggttcagaccgacaacgggcggcgattcaaggttgctctcgtctcctcctcttgttggagagggtttgcggtgttggcgagtgatggcagacagagaggaggcggaggagggagagctctctggcagccttggctccaaggtcgagctggcggtctgtctggctgggcgtcgtcgacctctgctgcaggcgcgacagggtccagagcgtgcggctgcaggtttcgccctcgcccgcctgcgaacccgacgacgccgccgaagggtctgcgcgggccctgttggtcggggcgggccgtcgggcgggccgtctgcgacgcgaccgacccgccggcgtcgcctccacggtcagatgctgccgctctgttcccagcacagcacgccggtggcgtcaaggcatgtcaagagatgaaaggcggggcggcgcgcgcaaacaactcatttaccagaggaagaagactggcttgtttggcgcaaggctcgctcggatgctgtctcctcagcaatgccgatcgttgtcgaccagaaggaacgatcaagcaccgcaggctgacgacagcacaggcaactcgagccagccactgccctttcttgccggaagaaagagttttgcaccgcgagaagcgacggcacttggaatgcaggggactggcgcggctcgctccttgcgcctctccttagacgctgcgccgagggagcaagcgtcgccgtatgcatgtacgtgcgagcgtgagcaagggaggaaatcgggctgcgacgggagggctccaactgttcattttcctcccggcgacggacggacggccacgctttggctgggcttgcccacgtgctcttccggccagcctcccctcccctcgcaagcaattcatcaaagggagggatctcgacctgcaggatgcaagcgaggccgactcgagggcgcagctcgtcgggcgcagccagcagcagacgagctcgacctcagcaattggtcggcgacctacggcatcccctgttcgaaggaaaacaggagcctcccattgtccagggcgagggcgcgacagacgacactacgctctgcgcgctgctgtcctgctgatgttgtacgtgcgcgcagtcctcgttcgcttgtctctcgatgagcgaacaaaagaccagcggctgttcagtcacgagaaggggggcacggctgagcgctgatctcttctcccagcctgctggcgaaagccgcccgggaccggacggagaacacgagacggcaggaagggacgagctttggcacgacgggcttgaaggctgcgccaccggtcgcggccgctcacggccgtgccctctgaacgaactccttccggcgctatggttcaaggattagcgacggaggaaacgccccgtcacgtctctttctatctgccactttcgagagcgagcgcgaggacgcttgatcgctgacaacattccgcctcggcagtcgctgccgcgcacttggcatgctcggcgaaaggccctgggaaaggaacgcatcgcacatacaacaaacagtcggggcgacagagcagagcgagagggaggaagtgaagagagaagggcgagcgcaggccttgcgggtcgaccgacagctcaggccgcatcgacgtgctccatcaggcccgggtcgacctcgtgcgcctcgatctcgtgcgggggctgctcgttccagtgctgctggtccacctcctcggaatcgagctgctgcgacggttggtgctgcaggtgctggtggtgatgctgcgacgtcaggctttggaggctgagagccgcctcctcgagctctggtgcgggcgccacccccgacggctcgccttgctgggagggacccgctgatggctgccggccatccgggtagttgaggcgctgacgctttggcagctggcgataccgtgggcaaacaaggcatagggcgtcagcgctgatggcttcgctcgcctaaaatgaacgagaagggacggaccgtgatgttgctgaacgccgcgggtgcctcggtgtgctcgcgcagcatgatcgtcttgagattgcgcgcgcggtccttgcacgagacgctggtggcgaccagaggtgcgtcagtaccggaggccagaagaaaagagacacgctcgtcgactgacctcgtgcggtcggcaaggatcgtgtcgaccgtgcccttcggcccgtgctcgccaatgatcttggaccacaactggtcgggtgtcaaccggcgcggcagtgtcagcggtcaatggcgctccaaagctgtgagggcgagacgcgccatcttctggccctcaaactgctccatcgcctgccggaggcacgcgtcctcctcggggcgccctgtggtagcaacggcggtcgtcagccaatctatagctaaagcgaagccaaaggaggacgcacatggcttccggcccgtctcgttgcggccctgaaagtagaggtagccctttgcgcttttgccgctgttgccccggcccgtgttctcctttcgcgccttaacgggcgactcgagctgctgctgctgctgctggccgaggctcgagccttccgccgccgaatgatcgatggcgtggccgtgcatgccgtcgtcattgctgtcgtgtccgacgtgggtccccaggtcgtcgacctcatgcgaatggacgatcgaggaggtcgacggctcgcgcgcgcgcttcttacctcgcgcgcgggccgagggctgggccgctagcggcggctcgtgcgcatcgagaacagacgttggcagcgatccgtcatcaagctgatcgtggtgctggccggtgccgtcctcgacaccgacgccgctcatgtcgtgcccggtatggtcctgcaggccgacctctgagtcatcctgtgaaggctcgatcggctggccgcccatcgactgctcttcttggctgtactgcgtctggctctcttgcgcgaggttctggacatactgataaagcgcaagcgatcatcgatgcgccgagcgtgtcagcgccgagcggcgggggcagcggcttggcagggacgagagacgcacctcgttgactggcaaaccctggagccggaagtcgttccagaggttctccgcgccaagtgacgagatgaggctctcctgactgtcgacgtaggacgcctgagcggcgacagcggcagcgacggcggccgcagccgccgcttcgtcgtcttgtccgacgccagcaaagtcgagcgactgcctgccgctcgcctcgggctcgagagtcgggtcgatgatgtcctcgagctcgccaacctcctcgggcgccaactccgggacttgcgactcctcgacgacgacctctcgtcgggcgactgctttccggccctttcccttgcccttcttggtcgccgccggcgcatcttgcggcaagtcagcctcgacccgggcactgtcgagcgtgtcctcgattgacggctggctgtcgatgaagtcctcgcctccggcgggctggtgcgagggcgggagcaggtcgtcgtcgagcgagtcgagcatgcgctcgccgggcagctgcgagtcgaggaaggtgtgctggccggcgcgcctaatgatggatgtcgggttagcttggcgagtggtagggcgatcgaagagggtcagagaaacgcacgatgactgctgggcagcgtagggcagccagatgtcgtgcaccgcgtacgtaagcagccgctcgaggacaacgtgcgcactgtacctctgccgcagctcatccgtgtccgtcttctgaagctgccatgcgcaaagcatgcttaggtcagtctttatctctcgcggggagacgaagaagtagtctcacctcctcgagcttcaagtcaacctcgtccgcccagaacttcagcaggccctccttttcgcgcgccgaacggaagacagcacgacgctcgcggccggggagggcaacctggtcggccgagcccatgaacgtcggcaggtagacgtccgacaggcgttcttcgacctgagggtcagccgtgtcgctgtgctgggcgaggatggtctgcgtctgggacgggtgcggatacgagcggcgggacaggtgtcagccgggaactgcgcgcgcgcgggacggtgggcgggattgagggggttactcacaaaggagcagagctcgagcagggtgcttgctcgtcgctggaggagcgcctcgcgccgctccttctccttctggccgctcgcgatgatacgcccgacccgctcccggagcgggtcgtcgcctcccatttcgccgtcctcatcaactgcgaccgcctcggcaccgaccaggctgaatgcctcgcgccatgcgccctccctcatctgccagatgagctccacctgctcctggctcagatttccgctgctgccgcttccgtcgagcgaggcggtcgtggtcgaggtggcgtgagccagctcggcgagggagaggacgagccgagcgaggttggcctgctggaggggcgcgagctgggcggcgggcgtggccgagaggggcgggagcgggatgaagagtgccgactcgaaggcggtcgtcgcaaagatgtctacgacgacgcaagaggtcagctgtcgaccttcgggggctctactggtcgagaacacggaagggaagggcaccttcgaccgtccgcttcgcctcgatgagctcgtcgtcggccccctcgccttcgtcgacgagtccgagccagcgttcgagcgcaagcagcgcctcgccgtcgtccttctcagcgagccggtcgagcgtgcccagcagcgtccggatgggcgcgtcgagcagcgcggcgagctcgtctggcgtcagggaggccgagtagccggcagaggcggtgttgtcagaggaggcggtggcggccatcgtcgccgttgcggccgccacagatgagggcgctttggaccgggcctggcgcgccatcgaaagcaggcgagcgggaggagcggattagggatctctggtgggaaaggggggtcgaaagggtagtggttagggttgaccccttgcgctggccggccgtttcagaggaggcgcgtcgagtgtcgtgaaagacgggcgggccggcgggcggatgtcagcctcgatggctccttgagcgctcagcacggagctccatcccgcgagagacagtttgcgtccctgaccgtttttgaacagctccgactgcatacggagagaggctcgacggcgtcccgaggtgcctcgaccttagacgagcatagatgattcttgagcccgacctcggccgacggtagccctcgcccgggacgaggcgtgagccgttgaccgcaacgcctcaccaccacctcgcactctatccttcccatcgaccatcgccatgtccgacgagcagtgcgtcggccaatctctgtcgtgctgtgaactatcctgatcgcctgggctgaccatcttgttctgctgcccgatcggccgtgccctttccaccgccttcgcctcagggttgtcgttcgtccgcctctctgctgggttctcgagagcacgccgaagcagcagctgaccttctctcttgtcactttacgatcttccagctccagaccgcggccttcgagtgagctcttccaccgcatcggctcagacggccgggcaaccagtgcgacgagacgagccgagacgagcgagcttcggccagctcgacctcgcgagccctgctctctcggctagggcgcctggtcaagcctctcgtccaggatcactcctggctgggcttgtttgcagctcgctgaccgcttccaatgcgtccctcactcgcgatcttcgcctctagcgcccggttcccccaggtgcgtcaggctcgagctgagctactcgaagatgagagcacgcggactgacgcgctctctgccgatcctcgtgcgcctgactcccgcagaccaatcagaccgtgcgtatctctcggtggcagcgacgtagcgtgtgaaggaagacgccggcgggccgctcgcaggccgcacatgacacggctgtccttcggagctgacctcctgcgctcgtccatccgctcggctttcttagaagcactggttagtcccatctgtccatcacagtattcaaaagcacccgtctgacccgtatctcactccgcaacttgctcctccccgcgcagctggcagaactttgtcgactaccagaagtgcatcaccgccaagggcgaggagtttgagccgtgccagaagttcaagcacacgtaccagtcgctctgcccgaacgactgggtcgacacgtggaacgagcaggttgaggccggcaaggtgcgtgcatgacgctcgcctcgccgtaccagttggctttcgagctatcgtgttgaccaccatttgtctcttcgtgctctttcccgcacacgctagttccctgccgacctgactccttagaggtgctttggtaaaaatctcggagggcaggatggacggaagggggcgcctgcatctgcatccctggcatcgggcgctcgccggcgaggagcgggacgaagaagaaatgaacggttttgcaaacgggacgagcggggcgacgggggagggaaaggccaggtgcagccgagttcatgcggggatggccaagggttcaggcaacgtggcattgagatcaacggcgctttgcatgccggtcgtcgtcgggcccgtcgcccggctctccagaggcgtgccgcttgcgactgcaaggacgcgagcgtgaagaaagtcagcgtcgaattgagctcagagcatcgcaggagggggacgtacctgcccgggtctgtcgagccgaagtcgtcgtctcgccggctgatcgagctccggccacgaatgatgagccctctgtgccctccgtcggcgccggcgccaatcgggtcgtccctctgctcatcgccggcagggcgtgcgcgtggccgtccctgggactcacgtccgccatcacgtgagtcgcgcgactcccgagcatcgcgctcgccgccgccgccgcctcccccacgctggtcgcgctcccactcgcgctcacgctcgcgctcgcggtccgtcctcgaccctccccctccagacgccggcggtcggttctcctctggcctgagcgagccgctccgcgagcccgagcccgaaccgaggccgctcccgccgcctggtcggcggtcgttccagccgtcgctgcgctcgcgctcccggtcgcccggcccagacggcatgctccgatcgcgtccgtcgcgtccgtcgcgctcgcgctcgcggaaaccgccgccaggtggcccgtcgccgcgtggccgactgctatcgcgcggccggtcgctccctccagagggtccaccggcgcccgctccggcgccgtagtcgaggtcctccccaccgccggcttgcggccggtcgaggtccttcttgcgcgggccggtcggaatgacgttttgtgggatcgccgagcgcgggccggacgggccctttggcggcgactgctggccgcctgcttgacctgacaagtggccgccacctaacgaccgacgcagcagaggtgtcagcttcgtcgatagtgcgacagcagcgagagcaggctgagaaggcaggacgcacctcggcctccacggtgcacaggctgaccgcggccacgaccagagccgcggacgccgacgaagcctccccggctagcagccggcgcgctcccccagccgttgtccgccggagggagcgagttttcctgctgctgttgctgctgaggagcaggaccgccaatgttgggcttctggtcctcgttgtcggcgttggcgccgagcgaggaccctggcggcgggcgcgcgttgccgagactgccctgctgctgaagcggcggcagctggtgcgagggctgctttgtgggcggctgctggtccggctggaagccaccctgctggccttgctgttgttgttgctgctgctgctgctgctgctgctgctgctgctgacccatgccagctcgggggccggtcggcatcccttgcatcccctgcatgccctgtaagccgtgcatgccgttcggcattccgttctgcatgccgttctgcatgccgttctgcatgccgttgtggtccatgacgaagccggcgccgttgcccatgccgccgaacatcatgccgttcatcatgttctgctgctgcatcgggtcgaaggcgaacatgccctgctgctgctattcaaggcagggggtcatctcgtcagcctgcggcgagcgctccctttacatattgacgagctccgacgcaccatcatcatctgctgcatcgcctgcgggttgttgcggagttcctccatctcgcgccgccggcgcgtgtactcggcccaggtaaactcgtcaaagccgtaattgaaccaatcgctgatgtcggcgccgggcatacgccagtccttgcggtcgaggagctcaatctcgatctcgtagacgctccggccatcgggcaggagcggcggcgcgtagaggtcgacgccgggctccgagggcgggatgtggactgccgggaaggcacgctgcgagaacgtcgcgttcagccgaccaaagtggttcggcagctcgcccgagtctgggaggggcggctgggtggcagcggcagcggcagagaccagggccttggtaggcgacgactcaaccttggcgaccgcagagggagtgctggcggtgacgatggtcgcggcggtcggcgcagcctgcgggtgaggtgtcgacgcagtcggctgcggggtcgcggtctgagctcccggacgcgctggtggtgcgtactcagtcgtcgtctgtacgggcactgtcgtcgtagattgagctggcagtcagcaccggcagacagattgcgcccgagagagcgagccaacgcactctgaagctgcttgagcgaaaggacaggcggagcgggcttcgcggcaccgagaccgtgaccgagcgtggtgacctttgtcgtgaccggattcctagagagaggctgatcaggatcagctcatcgcccagtacctcatgaggcggctgttcgcgttcgcacctgagatcgagaatgcggccagcatgcgggtcgaggacgatctcaaagtcctgcagtgacaagggctcgatcagcggcagctctcgaagaatgatggcttgagagctgtcggctacgcacatcctcgctgtcctcgccgtcctccatgtcctcctcgtcgccctcctcctcctcctcgtcggcagcggccggtgtcggctcgacgtcctcacctgctgatggagctaccggctgggcggcgtccgtagccggctccaaggctgcagacggctgagcgtcgcctgctggtgcactgccggagggataggaaaggtcagtcagctgattcgacgtgctgctcggcagctggtcgcgcagacggaggccaagagaggcagagggagaacgcacggcgcgtggccggccagcgcgccgtcgccgccatagagaaattcctcgtcaaagtcgtcgtccatctcgcgtaggttggagcgagaggtcggggcgagggttgaggacgagctggctggtttcctgtttgctgctttgcgagggagggttgtcgaaggccagacgagtgctcggaggaggcccaagggggtcgagacaacgttgatgctcgcccgagaggttcgtcctaggagacgggtccgcaacaacgcatctccctggacctcggggggctcgtgtagctcgacggcctcgctcctgcctcgcaactgacacgatgctctaaaagagagggaaggctgaccatccgagacctcgagctgcttcctgaataaacttcacttcctagtcgggacggcatgcgtcagatcgtgcaggaggcgtcggcgggctcgcggctgacccttcgacctcgctcggccatcgcagcacccgttcggcggggtcggccaaggactcgatgtcgccagccagcccgctcagcgtctggcgacttcctccacgccccaaggccctcctctaggtaggcagagccaggctggcgggaaggcgtgccgagcttgggccgatggcgcttcggcccgccggtcgcctgacgttgaaaagcgcctcgtcggtgtctctctgacctggcccatcgggaggctctttgcacgcgaggaaggaacgccctcggtgggcttctcgggcgagtaagtacaaggcaaaggagcgcgccatcctggcccactgacgacggcagcggcagtcggtctctgcttttcgtcaggcggaaggaccagctgaccgctggtctggcgctgtcggggatcggtggctgcctacgttcgagcccttgccgtcggatggccgagcctcgtccgggcgtgcgtgcgggcgaagcacccttggcgcagtcgtggccgctgtggcctctgaccgacggctccgagctgcagcgggcggacggggagcagcttccagcgccgccttacatccagcctggctgtcctcaacgtttgcacagaacgtccgtcatccttgctgcactctgcactccgcaggcatgccgctcttgacctgttgacggtagagacgccctgtgccccgctcggccagcccatggctggaggcgtcttccccgcggctgcgtttggtcttgggcgcgggcggttgtttgcaatccctcgaccgagctcgccatcctgcgcctttcgaccaagagctcgcccactcgagaaactctacaagatgaggctcgataggatcctctccgtagctcatcatcccatccctcactacctcgtcctcccatcccagcaagatgagcgacgccgcccccatcgtccgccggtcctgtgagtttcgagctgctgcgccaacgtcttccccccgactgcgaccagctgcttgttatgctgcgcagacgctaacctccactcgctcatgctttgttaccagggttccgctcggtgccatttcaggtgcgtccggcctgcttgcaacagaaagcccctttcaggccccgttgctgaccccagccgcgctggctgtaccgacctgctcagatcctcatcgccggccttgtctccatcagcgcgcctggcatgtggtgcgcattcctccggtacgagcaggagcaagagtcggacaaggagctgatcttgctttgctcactgctcgtagggacgctctcggcggtctcggagccggaggcgcggccgagccttacgccgtttcaggagccagtgcgttcctccttccgtctcgccatcctcacaccctcccgaccatccaccttcttccacatctctgcttaacctgctcctttaccctcgccgccttcttgagaagcgtgcggcgctgaccccgtctttgccccttcgctcgcagacgccatcgtttacgccctcttcgccgtcgtcgccgtacttgccgccgccgtcaacaatcgcatcggcctcaagtgggctctctttctgggcacgctgggtgtgcgtcgcttgctctatatccctccccagcgcaaccgactctgactcccttactcgcatctctcgacagttccccatttacgtaagtccctcccgtggcgctgttggaggttcaggacgatgctaacgaccgctctgcctcgccatttcacagggaggaggtctctacgccaacaatcagacggccgcgaccggcgtaatgttcttcggcgccgtcatgtgcggcatctcggccggcctctactggacggccgaggctgcgatcgtcattggctagtacgtcctcgtcaagctagacgcgacagtgaagccgcgcgcgcttaactgaccttgctcacctcactcagcccttccccgagggagcgcggcttctacctcgcctgctggcagacggccaaggcctcgggtccgatcatcggcggcgccattaacctcggtctcaacatcaaccgcaacggtgccggctcggttgggtgcgcatcgcttctccgctgactcgtcgtagcgacgcctcgactgactgtgcctactcgcagctcggccacctacatcgtcttcatcgtcatcatgtgcctcggagcgccaatcgctacgctcctctcgcccgctgagaaggtctggcgcaaggacggcacaaaggtcgtcgttcgcaaggaggcttcgtgggcggccgagtacaaggtgctcggcaagctcatgatctcgaagcgcatcctcctgctctaccctggtgcgtcggcccacagacctggatgcttccctcttggtcgacgctgacacgcaagctgccctcgccctgaccagtcttcttcatctcttacttctacaaccccttcatctcgacgttcctcaccaagtactttaccgtccggtcgcgagcgtgcgtcctccgctgttacgtgacacgcccgctcctgcttcggctgacctcccacctgtctccctctgcagcttgtcgtcgttcttcactaactttgccggcatcttctcttccttcctccttgactactttgtcgacaagcagtccatcaacatcaaaacccgcgccaaggtcgcctttgtgcgccctcttttcgctcaaccctcaacaagtctccaatctacagcgctaaccagctgtctctctcgcagaccgccattgtaacgatcctgatcggcacctgggtgtgggccatcgtcctccagcaggagttctacgagaacaagcccttgctcgactggtcctcgcctggcttcggccgcgcctacgcgatgctctttttcatgacgttcgccggccaagccttccagcagttcctctactggctcgtcggccagtactcgaccgacatctcggacctctcgcgctacaccggcctcctccgcggcgtcgaggccctcggccagacggttgcctgggcgatgcagtcgcaggctcaggtcaaccattttatcacgatcggcctcaactttggcatcctcctgctcgcgatcccgccgacgtggtacgtgctcagccagctcgagcacaaccacgagatccaggacgagacctcgtcgatggcgggcacgatcgtcgacggaggcgaggatcaaaaggaggccgacagcctgaagcaggcgagcgcgccccaactgccgtacccatcggtctagagctctagaggcgcttccctacatccactttctggctgcggccacctactatagacgctagtttaattagatcttcatgcacattcgctcgaattggaggtcgattgtcatcatacaggcgacccacattcactggtcgccgatcaaagcaagcaaagtctcccggaaggtcgtcgtcggtggtgcgaggtcaagaacggcctgggacgtcggagccgccaccttgaggctagacttgccctctgtagtacccatgtcgagggccttgtagagcgagagcatgaccttgtcgggcgtcccgctggcgtgcatcgcctcgaggaagctccggtcaccgaaggtgacgtcggtcaccttgccgccggtcagacgctcgacctcgtcaacgacgtctttgccagtgaagtcggccggaccattgaggtcgtacttttggctcgtgtgggcgaaggggtcgaccagggcgagcagcttgccggcgacgacaccgacgtcgtctgggttgatgagggcgcccgcgacgtctcggccaaaggcgactttgagcggcgcaaacttgccggtcgagcgataggtcttgaccgcctcggccgccggcggaaggaacatcgatgaaaagccggctggccggagcgacgtccacttaagcgcgtcaaatgccggcgtctctagcatcgtctcgatcgcccagtgcgaccggccgtagaagatggggctggctgggccgatgtagggcgcccaggtcgagatccgaacgacgtactcgacgccagctccgaggcaggccgtgtagaagagcgactcgtcggtaaactggttgtcctcgttgtgcgaagcgacgaaggccttgacgacattgcgctcctcgagccaagcggcgtcaatctcgggccagaacttggcctccacctcgacgaggggcaatgcagcgagcaacttggccgaagcactgtcggtcgatcgtgtgagggcgagaatgcggatatcctggccagcaaggtcggccgagagggtccgaacggtgctgcggccggtgttgccggttgctccgacgacgaggacggtgcgtggggcggcggtcattctgcgacggacgagaatatggtcagtcagtgagccgaaggaaaggagaaagtaatttcgagcgactcactcggcgtaagctaagggtggggttgtgacgggcgggagggcagagcgagatagagagagggtggtgcgggtagggagcgaggcttgatgttaataaaggctcgagcaggcagcgaactgtcggcctttatggatgcgagccgctccaacaaggtttggcgttgacgctggggagccagcagtcagcagaaggctccgcggtgagtcgggttagtaaccggcttcccagccgccgccgacccaccgcacgaccggaggccggcgactgctcgacgtcaagccatcagcgaggatgagtggatcgaagtatgacgtcgaaggccaggggggggacgtacgaggagtatgaaggaggggacgagcgtcgttggaagggagaagggcgctcttgctcgctgcttgcgttttcaagcctccttctgtggtccccgagtcgggtgttgctcgcgcgtccttcatgagaaaagagacgaaaagagacgaatggttggcgttcatcctgtttctgtgcttctacctcccccttcgcgggagttaaacgcatggcgcgctcgtgggtcaacaaagaattgcccgcggaaccttatcgtccgggcattcatgaccagtcggtcagcaggcagtcagccacaatacgaacctgcgcagaattctcactagcgtcttggtcacgggccctgccaccaagctgagcgaaatgagcggacgctagggcactgcttgacacgacagcaggcatgagggtggctcgatggaaagagagagagcgggagagtaaggagggatagatcttcagcgtccgccgtgagcttcctggatggcggcgtcgacgtcggcgtcaaagacggccttggcggccgaagaaaggctcccgccgacgacctcctcgccgtctcgcccctcgtcctcctgctcctcgcctggctcctccgactttggctcggccttcgccttgcctgccttcccaggcgtcacgccgacgagcggacaggggccgaggctcggccgcgacgtcttgccgttggcggcgcagcgcgtgcaggccttgccgtgcgcaatcaggaggacgtggagcgggtacttgagcgtcgacgggatccggacgtcgaggtgctcgtacgtcgtctctctgtgtgccgagatcgacgtcaggaaagggcgcggctgcagataggagagggaagcaaggcgtagacggacggacctcgttgcacgggcaggaacccagccgagtgcctttgagagtcgatagacgtgcgtgtcgacggcgaacgagtcgcgctcgaggcagaagaggagaacgcagctcgcagctgtcatcaagtcgcaacgaacgctcagtgtcagcgtcgctgcagatagactcaaagcaggacgcttgagaggacgtactcttcgggccgacacccgggaacgactcgagctcgcgcattgcctcgtcgtcggccatctgatggacatagtcgagcgaaagcaaacggtcgagcgtcgcgtcgtcgtccgtgttaggaggcgtcctagcctctgccgaggctgctgcagcctcgaccttgggcttggtctcgggtgagggaggctcctgctttgcgctacgacttgcccgctttgctggcgctgcagaggcagctagcgcggcggatgacgaggcacccgcatccggctcggccttgaccgccgtcggcttcgactcgtccttgacagccgacggggcaggggcctccggcacggctgccgcttcctttggcacggatgcctcggccgcctccatcttggcgttccggtcatagacagtttggaggacgcccgtgatgactttgcccttgacgtttgcaagcccgccgcagcggatgctgtcctggacgtcggcgagctcggcccggaagacggccgggaggctgacggcccggctgttggccttcgaggggccgaagcgttcaagcagggaggcgtaggcccgggcagagttgttgttggtcgtattttgcgagaggatggtgcggatgctgagggaagagtcaagcgcaggcgacgtcaggaggggcgcagcggcagacattcgacgacgagcagcaagtgagacctacagcgcatcgcagaccgagggcacagcgccgcctgcaagaagagagatgagtttgtaagttatgccggaagtcaaagtcgggatccagtcctctggcccgcgactcacaagcctcgccgacgcgcacagggccgttctccttgagcttctcgacccgccccggccgttgaggcaggccgtgcatctcgccgagcaggcgagtcacctcctcgcactcgtccgccgtcggccgcgcatagtccgggtacggcgtcgtcaggtaggccgcgaacttcttgggcgtcgtccgggacttgctgtccgcggtgccgttctcgccgtcgctgccgccgccaccgacggggctggccgacgacttggtcgccttcttctttggcgtcgcccgcggctttttggacggcgtcgcaccggtcgcagcatcggcgtcggcaggctcgcctgcccgccgcttcttggccgaggacgaggaggtcgacgatgggtcggcggcggcggcgggcgatgacgctgctgcgtgcgtcgccgatcgggtcgtgcgcgcggtggcgagcgagtacatggcgcggagctggacgggtggcgtgcaagtgagggctttgacgacgacggcgattatgggcaagagaacggtccgtaggggcatccaacagcagctctgcaaatgggatgggaggtggcgggcaaggaggatgaggagcgacgccgggccgctcgatctgtcgccacctgtggtggctctccgatggaggcggcaccaacagggaacccttggctcactctccggcactaagagcggaacagttgtacagaatagcagctcgaggttagccacagatgtccagcgacgacgtcttctgagtgagtcgaaagccgatgaggctctcctgccaagctcagcgggagaggaggagggtggcgcgcagcaggagaggttcgactcgggaggatcgtcccgtcctccctactctcgcaaccacgaccatcctcgagcaacctgatcacaaggtgcacatgcgcgagagagagcccacatcaccataagctgcaaggaaaagcaactgatctactcttgtgcccgcagcctccaccatgccgccaccgccgccgccgcctccgagctcaccgccgccgtcgctcagctcgtcgtttgcctcgctcgccctctcgtcctcgacggcctcgggcatcgccttcccgtcccctgcgccctcagataccgcctcgctcgacctcggcagcgacgactcggacgacgagttcatcgtcctccaacgctcgcagtcgggtaccggctacgacggcccactcgccgccgggctcgcagcagcccctgacgccggctcatgcggcgggacccgccccgtctcggatgaagcgggagcggctgtgttagagccggtcgcgtcgagcgacgacgagcgcatcctttcctcctcttgggcgtccgactcgatcgacatttttgacagcgacgacggcggcgagagcagaccgctccggtgggccgacgagggcgaggacgagctcgacctcccgaccgctccggccgccgacccgtctctctcgacggccggcgaacggacccccgtctctggcctgaggccggccacaagatcagatgtggtctctcctccggcttcccgtcgacgcaggtggaggcgacgaagcagcgagggcaagaagactggctcgtctccgccatcgtcgtcctccgcagcctccgccggcgcttccgcctcgtcttcgtccgcccactcagcctctgcgccaaatagcatcgccttttcgtcttccctcgcctcccaacgccaggcaacctccgcctcgtctcacctccgccgtccgtcggtccggaaccggtcgtccttcgggtccgacacgccgtcgacattctccgtctcgaccggctcggaccggtcgcatgcgagccgatctgagggcgcatctgaagagatcgtctttggggtccttaccggatcggaggaggacggcctctctgacatctgcacggacgactctgcgagcgcggtgctcagcctgtgcgtgattccgctgccggcgcgttgcggggcgacggtgctgacctctcttgcgcgtctactttaagtttcttcgacgattcgaatccgttcgggagtgccggccctggcggtggaggcgcgctcggcaagcttcgcttcgtacgtcatacctgcaacatcgctcgcctcaggcgctaacttgactctgcctgccacagtggcaagcgctcattgtcgagctcggcgtcctccctgcgcccgacgccccatggtccgagctttcatcctccggcgacgaggattcgtccgacgacggcgctggctcgtcctctggcgcctcagaccggacggcgaccgaggccgagccgttcccgacgtcgctcaaagcgaccaggcggttgcttaaggccgaggcgcacgtcaacctcgtcgactacctctgcctacggtcgaagcttgagagcgcacggaccgacgatgagcgggccaagctccggagcgagataaagggcctgagcaagagcagccgcgcggctctgaagtggtaagtcatcctcctgtgtcatggtgatgcctcgcgtgctgacgacgaggctgcgcgcacaggtacacgatccggagtcacaagtttgcgaagcggacccttgtcaagaacgcctggctcgatccgctgatgattgacctcctctgagacgaacgaagccttgttgcatctcgcttgcggcgacctctgctgcatccactaccggccgaccggccgtctcctcgcccaccgccgggcgatccctttccgcccccctgcctcacgacttaccatcatactctggctgcttctctctccctctcctttcgtcctttgctcctctacatgttcttttgacataggcccgttttggtctgcgcgctcgggaccacgcgacgcctcgcaatgacggtgactgctgcgcggttgtcggccgaggccgcatggtccgcccctcctcccctccgagccaccttgcttcgctgcctcgcaacgaccacccactcctctctcccgacaccgcccacatcgtccatccatcagctttcttcctcgatgcccgcactccacgcatcgaccgccttcctagtgggcggcatgctcacaacgggcgccgccaactcgctcctcagcaaatggcaggtgtgtccggaccgccagctcagccagttggccatcgcgcccggctggcctggtcatcagcctcccttcagacatccgactgacccgagatatcttccactctgtcgagcaggacatgcaatggtgcgcatcattgcttctactcgtacggccgagatcgatggctgatgacgggcttctccccgcagcgtcgagaactgctcggccgccgaccccggggcacgcgtcctctttgagcagcccgtcttccagagcctcagtcggtcctttagctcggcgtgctcgcatgggccgtgatcgttgacccgacccatcatgcccttccgcagacatgtttgcgggcgagagtgcgtcgcgtgggaccgccctcaacgcgagccactgggctgatccgagaccctcttcttccctcccttcggacagtgctctgcctgcttccgctgctctactcgtacctagcctcgccacctgatcacgctccggcatcctctaagccgcgcgcggcccgcatggtggccttgctcaaacgccggctgtcgcccggcggcagcagcagctcgtccggctacctcccggtcgaccaggacgaggcgcccaaccggccggtcgccgcccgcatcgacggcgagctcgagggcgacgacagcaacaggcactttggctggcgcaagtgggctctcttctgggtgccggccatctgcgacatgagcggcacgacggtcagtgcccgcagctcgagccacctccgtctgcccgctgcgcgcgcccccttgctgaccgcggtctctactcgcagctcatgaacgctggcctcatcctcacgccagtctcgatttaccagatgacccggggctcggtcgtcctctttgtcggcgtcctctcggtcatcttcctccgtcgtgtgtctgcctcttcgatcgcaatgtcgagagcgcaccgcatcactgacccgcgatccatacaggccacctgcaccgctaccagtggttctcgctcctctgcgtgatgattggcgtctctctcgtcggcctgtcgggctcgcttaagccgagcgatgcacccgaggtgtctaccgccgacgaagagggcgccgccaaggtcttcattggcatcctcctcatcctcttcgcccagctctttacggcgacgcaggtgcgccatccactgtcagccgaagtatcggcgactgcagcctgactttgactccctctcgcagtttgtcgtcgaggaaaagatcatgtcgcgctacgaggttgacccgctgctcgctgtcggcctcgagggcacgtttggcctgtttacgaccgcagtcgcgatgccgatcctgcacttctttgtgagctctctgctctgttctcctttcggtgttctgaccgagctcactgggctgacacctctgcctgccctcgcgccttcgccagttcgccgccaagtacgagacgtttgacctctaccgcctctgggatcaggtcaacgccaacaggctcgtcgtcctcctgtcgttcgcaatgtaagacgcccaagtgctcgtgcacctttacacacgctgaagagctcaccctgagcactactcctggctgcctccagcatgctgagcatatcgagcttcaacttctttggcctgagcgtcacaaaaacgctctctgcgaccgctcgctcgaccgtgcgtgccaggtctccgattcctggatgccggtctgctcgctgacgcttcccttccgttcccttccgtgctggcccgtctgcagatcgacacctgccgaacgctgctcatctggcttgtctcactctcgatcggctgggagacgctctcgttcccggcctcgcttctccaggcgaccggctttgccatcctcgtctggcagacgctcgtcttcaacggcctcctccgcccgctcttctgggcccacgtcgagggcaacgttcggctcggcgaggccgaggaaatcgaggccgagcggcagcgcgagcgcgagcgcatcctcgagcagacgggcgagctcccgtttgagggctccctcggccgggtcggcgtcgatgccgtcggagacgagcggcggtgaccggaggcgcgatttggcagtcgtctgcgttgcaactttctggctcgactccatctctacttgtatacgaagcccctggtggacagcgcccgtctttcgcttccctgacgcaagagcgcacaggcaggatggatctgagagagacaaggagcgcccacatctgatcacgggcggttagactacacgtcgtcccactcctcgagccaaatgagcccgtcctcgtccagacggtgaagccgatggtccacaggtcgggaaccatagcgttgagatgagggaggacaccacctcttgtgggggcgtccagtccgtgccaatgtcgacgctctcgacgagagcggcgaggttgggatgtgtgacgaggctcttccagatgcggccgaccaatggtctggcaggccgagcatgtaatcaatcggtacaggtgcggccgtagcttggcctgcgataagtgggaaggttcggatcagccgacgtcctgtcagagtaagatgccgtcccagtctgaaagtgctcactgcccaagcccgcgacacgagggacagctttgcgagatcgcgtcgcgctgaccaggagcggggaggtacccgatgatgtccagctggagctcgaccggcagccgctgcttgaaatgctgaacacgagtcgagatggaatgcgaggcagcccacgggtcagcccggaatatctagtacgcgccggcaacgggaggcgtaccgtgtcggagagatccgaaccaggggcgttcgaggttggccaagagacgaccgacagcgagtcgacagccatctgcagcctcggctggagactcaggcgtttgagcaggagcttgataataagtccacctgtccgctggcgctggtgaggctaccgtcggggaggaggcttcgtgaccgacgtcagggtgagcggccgacgcgcgcgccgaaatacgagcttggcccgacatacctaaatggaactagcgagaaggaggacatggggcgaggtgagagaggaggtgagagaggaggtgagactggggagattgagggtcgcgcgaaggaaggggggatggcggtcagagtggcaggactgctgtctgtttgcctccagtgttgaccggcggcgcgcggctctttcgcttgctggcgatgccgtgcaagggaggaagcgagccgagcgcatacagtcaggaaggaggtccgatggcggctgcatagacccctcgtccctcgtcctagccttggtccgcgagccgccccttgtcgcctgcgccttttttggcagttttgctcgagcctgaaagggatcagccatctagaggtcgctaaacgaggacgaccgagtcgaggacgctgaagccgacggcgacaccgccctcgtcgctctccttcccctttgtccgcaagagcgtgccgacgctccctgcgtcatcattccagcagacctcgcccgcgccaaagagggtcgtgccgtagacgccgagctcagagatggtctccttgagctcggacgagtaggtcggcgccggagctggtgcgggcgggagcgagcggaggaggacgttggacgatgccggcggggtaatgagcgacataaggatgtaggccgactttgccggcggctggcccagtgcgagttttctggtcggccagaagagaacgctggtcagcgacagtcagcggctagctcgttcgattgacgcacctgtcgccctcctcgagctcggccaggaaggacccaatgtccctgttgtaaacgttgttgccgccgccctcacgctgaggcttcaggacgtagccctcgccgccggcgctctcccggacgagccgctcgccctcgtcgctcaacgccgtgccgtcgcccagcggccagaggcccataaagctctcgcggagctcggcaatctcctcgtcggcaaagatcttgccccctcgcgcggccggcgacgtctgagtgtcggcgccggcagccgagctcgcggtcgggagaaagtactcgagcacgccaggcgtcgcgagcacctgctggaccttcttgctgccggcgagctgcagcgagtagcccgggcacatgatggccgtcgagctctcgagccgggtccgcgtttgccagtcggcggccgagtggtaatcatcgggcgtgtaggctgcccggtagtagacgaccgagaccgggatgggcttcgaggagtggggcggcgtaaagagcaggtcggacgagtcggattgcgaggcggccgaggcgagcgtttgcagtgatgcgcggtgcgaagagacgccgtgcctgaaaaagaagcagggtcagtcgaggtcgggcaccatcccgtgatggggccagtagccggatacgcactgctccagcagctcatactcgagccaacgctggtcgaaagcgttgcgctccccgtcctggacgaccatcaggatggcgctcctgagttaggcgaaaggcgacggagtcagtcaaggccgttcacgtagacaagcatcttcactaagggactactgaccctggcagggctcgcgctttgtgcgcctcggccagcccgcgtgcgagccctcgtatcgggctgttgacgggcaggttctcggacgtgagcaagggcgagacgccgaggtagcccgtctgggcagcgatgtagctgtcaagggccgtccgaggtcagtcttacgtccgggcaagatcgacttaggacgaacgcaccggtgtaggccagagaccttctcggagagcgagccgaatgacgacgagattgtgttgaactcaacctgcttgatcgcgagcgggccgtccgactggtgcagcaggtagtctgagcgcgagataagcagttgaagaggctgtgaccagggtccagtcagctcaggtccactcatttcggacgatgcagcccggccttggaccgacctgcttgacgccgaggcgccggacctcggtccagttggtccagaggtcgcgcatgaagccgtcgccgccggcctcgtcccagaagcaggtccgagcgaccgtctcgagccactgctcgtccatcgtgatccgggcgtagagctcgttgtagagcggctgaagccggagcgcctgctcgtgcagcgcgcgagggaagggcgtcgggaagagcgagaccggggcagagatggccgctgcgcctggcgggctgctggcgcacggggcgagcagcggccggtagacgaggccgtgagcgagcgcatagtcgagcgagagcacctcgagatgagcccgctgctcggccttgagcgacggcggccaggcggggacgacggtcggtgcgacggtcgccattggtaagcggctggtcggagggagggacggggggtcgggagagggagggaggcggctggaagagagcagagagcgctgaaagccgagtcagccctgtttcgagcacaccatgctgctgtctcgaaacgccgggcgactcacgctggtgtcgagatgagcggtcgcgagatagggtcggaggtgagagctgaagcaggtcggtgccttccccggtcgcgccttccgccgcctcgatcgcctcaggccgcccgtcgggccctttcccaagtcagacccaaagcgcccatcatgggccgctcgcccgacctctcccctgccaggcctcttgtcccgtcaaccgccttcgacaggctgcaagtaagctcgcatgcagagcgatgtctccttccgaaacgtcgggctggatccctgtccgggccgggtcggcggcttgaccggccgaggtcgggtccggccttcgccgcggccaaaggtcgtcttcggcgctcggacgccgaaacgagggcgagtacgcatgggcggccacttgcgcagaccgctggaagacgagctgactcgagcatcttgactgcaacgtcgacctcctgcaaagcaatcaacgctcgacggcaaagggggcgctgatcttgcacgagcctcgggcacgcggggccggtaccggtctttgcctccgctttcagcaaaccaagcagtctggctcggacgtttatgtgcctcgacctcgacgcctcatcacctccttgcccctcgatacctcgacggtgctcacttactcttgccagaaaagctgacctgctcgacgacctgcctcgtgctggctgtcgcttgcaccctctcccagctgccgctgacagccgcaagctcaattgccattggctccctccgctatcgattggtcggtcggcccctttggcccgacacgccccggctccatgactctggcgcttgactcgggaggaacgcctcaaagggccgagcactgctcgccccttcttcgccctcttcctcctctcatcctcaagctcgccccctcacacccccgctcgccgcctttcgcacgcacgaccaatgtccgacacgaaaaacgcggccatgctgccgccgacgggcgccgccgagaaggccgtcgtcctcgacagccggtcgagcacctctggcgaccacgactcaactgcgagtccctcgggtaagctcgaggccggcctcatcaacgacgaggagtaccagaggcgcgagaaggccctcgtctggaaaattgacaaaaacatcattccgttcttgacgtgcgttcgcgtcgagcagctcgacggcagctgcgcgagccgcccgcagtcgaactgacccagccgtcccctctccattcctccagcctcctcttcatgatgtctttcctcggttcgtctacgaaggaggacgaggacgccctctcgcagctcgctgacccaccctgcctcacctcttcagatcggatcaacattggcgtggccaagctcaacggcctcgagaaggagctcggcctcagctccttgcaatacagcatagcttcgttggttttctttgctacgtatgtcctcctgctctggtcatggtctggctgcggaacgccctggagctcaccgtccgtttccccctcagttatgtctttttcgagagcaagtttcccccctctggttcttgatctggctgcggagcggctttgatctgaccctccgtcctcctcacagtcccgtccaacatgctcctgaagaagatccggccgagtcgctggatcagcttcctagccatcacctggggcatcaccatgacttgcatgggtctcgtcaacaactttggccagctcgtcgccctccgggtcctgcttggcatgctcgaggccggttcgtccctttgcctgcttcgctcgcccgccctcgcgcccgagaagtactgacgtccatttgctttaccaggtcttttcccggcgattgtcctcgtctgcgcctcttggtacaagcgcagggaggttggcctccggaccgccatctgcttctcggccgcaacgctcgcgggtgccttgtgagtgccgctccggcctcggggctgaccctctcagtcgactgaccgctcgttcttttcgactttcagcggcggcatcctcggctacgccatcggtcggatgagcggcgtcggcggcaagctcggctggtcgtggatcgtgcgtcgcctacaggccggaactctcgctgcgccaaagcaatggcaatctgacccgtcctcccccctcccccttctcaacagttcatcattgagggcattttgaccgtcgtcattgcctgctttgcgccctggttcgtgcacgactttcccgaggaagcccgcttcctgaccgaggaggagcgggcgatggtcatcgaccggcttcggcgcgacgccggcgtcgccaacgcctcgaccttccactggcgcgtcatccgccgggcgctcggcgactacaagctctatctgttctcactcgtttacgttggctgtgccgagcccatctattcgcaggcgctcttccttccgcaggtgagagcctccccttcaagcgctcgctgtcctccttctgactggcgagctgatacccgcgtccctgtctctagattgtcgcctcgctcggcaagtggactcagccccagtcgctcctgctctcggtcccgccctacgcctttgccttctgcacgacgctcgcgaccgcctttgcggccgaccgctaccagcgtcgggcgccgttcctcatcttctggagctctatcgcctgcgtcggctacatcatcttcctctcggtcaagatcgacaggcccggcgtcctctactttgcgtcgttcctgacggtcggtagcatcgcgccttgcatcgcgacctcgctcagttggttccagaacaacatccagggtcactataagaaggcgtttgtcctcgggacggccatgtcggtcggcaactcggggtacgtcttgcaatcgaatctctcgtgctttgacgacccggttcgctgacctgaatctcattccttggctgcagtggcatctggtcgagtctagtctaccggtcaaaagacaagccagactacatcccgggccactctgcgacgctcgccttctccgccgtgagtcgccctcccgatccctctggagactaagcgctcgcagctcacaccctgtcttccccctgccaacctccagatgtgcctcctctgcacgctctttgcgaccttcctcatgcgccgcgaaaacgcccggaggaacgtcctctacggtccgccgccgctcccgccggcgcgcggcgagaagcacgccgacgacgtgctcgagcggctcggcttgctcgggatgagcgaggaggagattagcgacctcggggacgaccacccggccttccgctacacgctgtagaaacgaccgcctcttacaccaatctagacattctccgccctcaccggtgtcgtccttgtattgccctcctcagtgtcggccttctttcactccctctcatctctctcggttccgacctcgccgaggccccctgctgtctgcgcctgcccagccgcttttaatcttgtacgctgctccttccgccatgggtctagccgtcacgaccgagcgacttgtctcccgcaacgggcccgttattccttcttcccatctttctcggttccgatctcgccgagggcgcgcagcggtgcgacgccagatggcagtcgcagcaatggagagcccaaaactcgacacttgatagatgtgacgagtcaggaggcgtcatgaggatccaaaatcgggcggcggtgcccgggagggtgtcgcgacatgcaaggcctggtcaggcgattaaagggggatgtggtgggcgtggtgtacaggatgagcgaggggaatgcgcgaaaggagggcgatacatgtgaggcgggaaaagatgtgtcgtgcaggtagcaggaagagcggagcgggaagaagcgcgagtacgaagcggtagaaaaagcgcagcgagtgcccccttcagtccggggcgagggtcaaacggcgatgagggccacacaaggtcgtgacgaggagagggaggcgagaagaggtagggtcgacgccgccctcagcgacctccgctgccgatgtggccgtagtgtcccttgacgccaagacggcacttttcacagtcggcccgaggacccattgtgtagcccgagccggtcttgctcgccaacggcggcggctggagtggcttcggcgagccatagtggtagccgcctgccggcacgccgtgcgagagaggcgagaccggcgggagggcgaccgtcggctgatgcggcgagtgatggggcgtcgacgccggcgtctgcgacgggtagccgaacggcagctgatgcgtttgggccggagcgaacgcctggtgcggctgctggtgctggcgccggccgcggcgcggtcgctggccgagttggccctcgccgagctggtcgtcggcattctctggaaagtgctgctttcgcggaacgagaagcgtgcgcgcgagaagaggggtgaggaggaggagcggttcgcggtcagggcccagacgtcgagttgcggaaaggcaagcaagacatgacgatagcggggcgacagggggcccgcgaggaggagtgacgagaaggagcgtgaggggagaagaaaagatggctggagaggaggcggagcggacgagtaaagaccgccagggacaagagggacagaaagagacgggcggctagtaacgcacagtcgaccggctcgatccccatgggacaggattagtgcagtcgtcgtccatctccatgtcgtcctccatgtcgccaccgccctggagttcgtgcgcggcatagcccatgaagctgacgccggcgccgaggtcctccatccgggcgagcgccggctggaccgacgcctgcgccggggcctgcccaaacggcgacggctgctgctgctcgtgctgcggctgtatgtacgacgactgggcgggcgagcctgcggccagtggaggcgtgttgagcggcgagttgagccggaggtgctcggcgtgcgcgagcagctgcgactgcgggtcaaaggcgagggccggcgtcatgaatggtgccgaggccgcgtggtgcatgaactggggccgtttctgaaggaggagcagagatgggaacgagcatgggcggtaacggggcggagcgagtaagaagggggtcggtctcagaaggtcagcctccgactcgaagactggcctggggcgcgaccggcgcgaccacggcgcgtcagaggggaagggacgacgacgtaccgccgagggctcgggcgccgagccgtcgtttgaccgtgtccgcttgagtgaggcgccgaacccctgggtaggaaactgctgctgctgctgctgcatcattgcgaactgctgctgctgctggagctggagttgctgctgcggctgaccgaacgagttgaacgccggcgaggtcgcgtgggccgacgggaacgccggcgccggccaaccgccgtagggcgtcgacgacgacgacgacgaggcagtcgaggaggagggagcgttcgggtcgacctgcatgaccgttcggctgtttaaggaggagagtaggaagggtaagaggagagggagcgagtcgacgttattgggggctcggagggcggcggcggggctgaggcggcccagagccgatttcaatttggccgcggcctggggaagtggagcccaagctctgggctgtatcccaccagccggtcctgcgaggctgcgaaaggggcttgcctcccttgaatggggagcgacatgcagtcgctggtgttgtagctcaagagaccacggctgcgagccgtgtctgctcgagctgctcgtcgggcagggaggacgacgacgacgggagggaaaggggtttttgcagccgaggcctgaccttactttttcattagctccgaaggcgaaacgcaataagtcaacggcgcgtcgtcaagaaggcacagctgtcctcgactccctcctcagttcgggcgcagagagagggaggagaccgtggctagcctcgccgtcgcctgccaaatctgttgccagcacgagtcgctataagaagctttcgaaagtctggcctgcagccgggacgcctcgagagcaggacgacgcgactgtccttcctgctgcaggctgcggccgccgtggatttctctctgctgcgcgcgcgcgggtcgatcgaaccttgtgcgcgggcctcgagctgctgttgcgcgcgcgagagggcgacaagggcgaaggacgcagtaagcagcagcgcggccctggacctcgcctcgatacccagcgccttttgccagcagctccttagccatcccggtcctctggaagccgacaaagcagagggacggtcctcgcgagcccacgtcaacaagtggtcacccgatcagcaggcccgcccttcgcaccgtcgctcaacagccgtcagcggccgcctttcagcccacgcaacccgcgccggcccttccctccgagccacttcagtacgtcccgcccttacactccctcttggtgaggtccagaaacagcgcgacagctctgttcagctcgacgacgctgaccttctgccctatcgcacgccgtctccgccatcggttccacttgccgcagcttgctgctccctctggcttcgcgtcgcccggccggctcgctcaacagccgcgacgagcttcgccctagctcgcaggggccatcgctcctccgctcggccctcccgcatccaccctcgccgcatcggtgcccatctttcaggtcagcaagcgcctccgacgagggtcgacccatggagacggccatcttgccagcttctgtgcgtagtcttcggcgtcgggcgacgaatgggctcgcgctaaccaggctcgtgatccgcctcgaccttcctcccccacctcccctctcgtcatggtcgacccccttctctccgcttacaggacgccttcggcatgcacccgcatccttctcgtctgaacgactacaccttcccgtcgagccaccagtcaggcaacgcgcaagctgcggtcggagggccggcgcagccgccttcttccgccgccgcccaccagcagcagcacaactccggctacgcggtcgcatccggctcgaggccggcttacattcgtcgacgctcggtccagtcgatccagacgcactactcgcatcagcagcagacgccgtccggcctggtggccgccgctcacgcgtcggcgacgacgccccgctcagccaccttcccgcagccgatcttcgacccggactcgcccttcagccagccaccccagggccgaacgaccgtctcgcccgagaagcagcggcacccaagccggcccgtcgttcgcactccggagccagacgagagcaaccggccctactggggcgaggacgcgctcgggacccctcacgcgatccggtcagctccgaaggcccggctcgaggacgtcgccgagagctttgctcacaaggaggccgtcgattcgtcggttggctatctgccggaggagagctacgtcgaccacggcgtctttgatggcggccatcagccgatagcggcgatccggcgtgagcgtggccgcggccgggccgtcgtcctcgacgtgcctcaatcgccaccaccggcgccggccatgcacgacgagcaggtctacatccagcactcacatcagccggtccaccaccatcactatcatcatcagcccgaaccggcggcggcgtacgcgcctgtcgcgggaccctcgtcggcacgcgtctacccgcagcaccagccgccgtttcatcaccgcggacagtcggacgacctccataatcggcagccgtaccgaccggtgccgacgacgccggcgtcctactacgtcccgacgttgcagacgactgcgctggcgcctacctcgccgggcgcactcggcggcgggcactaccagccgccgcgcgtcatctcgccgctgccaggcggaggcgactggggacagtttgtccacgccgagcttttcgaggagggcaactctcaagaggagattgcgccctttggagcagccgcggtcggtggtggcgacggcacgtcggcggcagagcacgagcatgctccccctcttccgcatcagccgcacgtccggcagcggacggtcagcgcgcatgccttccaccacccgcgaccgcggcccgtcatgagcgcgcacgacatcgagccgacgccggtgctcgagcctcactcggacacgtcgccgaccttctcactgtcgtcgcgctcccagccgggcacgcccgcctcgtttggcgtccctgactatgccgaacaccaccagacgcagcatctctcggcagcgggctcgtcgtcgtacgcgtcatcgtcgtccggaagcggcagcatgagtcagtttcaattcgcctcggcccagccgtacaacccggagacgctcgacagcttcaacccggcgcagatgcacctgccgccatcgtccttcacctttacgagcgcggccccgccgccgccgacgacgcgcgtgcccgactaccggagccatcgccggatcaagtcggtcgagtcggtcatgtcggactatggcccgctcgccggccagcccgaccacgagacgatccctgaagaatacgacgactcgttcggtccgtcggacgcgcacggtagccactcgggcgggcgggacgactatgcgctgaacgacctcgtcaagcaggttcacctccagcacggcggccagtcgctctaccgcgcgcggaccgagagcgcaagtcgaccctcgaccgcctcgcgtgggccgtcgccgatggatcactaccaggcccacccgaccgagcagcagctctcgccgtacgctgagcaccagccgtacccccaaccgccagcgccttacgctcaagtcctctatccgcctcaccaccactcgattggcacgcccgtcatcttggtcccgcacggccagccgcctccgccagggatggttccgatccacacgacagcgtacgccgccagcgacccgagcggccacccgaaccctgccagcgtctacctccagccgcactcttcgctttcaatcgcgccctcaccgagctatcaggcgacgttcaacagcggcagcacgagcccttactcggtccactcgcccgtcatgggtcgcgcctcggaggccggctcgtcgcactacgccctctcgccagtcgtcgacggcgcgccaccgcctctaccggtagcgcctgcagcaccgtcaaaagagacgctcgccgcccggcgtcgcagcaaccggcgcggagggagcctctcgatgtcgagcaccaagaatggcggagagatccagcccctgtcgttctcggcctcggatctctcggcctcgaccgcgtcaaccctcaagcaggaaccggcagtcgactctgtgcactttcacccctactcgaggccgtcgtcctcgcagccggcctcgtcgtcggccgcgccgtcatcgaacacgagcaagaccacggccagctctcgcgccaggaagcgacggtcggccgctggcgcgaccccaaagcggcggccaacaagctcaactgcaggctcggcgctcttaagtgcggtcgacaagtcggccatggcagcgctgatcgagacgctttacgagccgctggatgccgataatgtcggctccgagtcggcctcgccgccgcccgcactcgactacgacacggcgactggcggcaaaggcaagggcaaggaggagctcaagttccgctgcctcgtcgaggattgcgaccgcgccttcccccgacggagcgccatcattcaccacatccagatgcacctgagtgacaagccctttgtctgcccggtgcccgactggtacgtcgcgcggtcagactcgttctgctgaagacacttgcccaggcgactgacgacgcctttggcctcccctcacagcggcgcctctttcgtccgccagcacgacctccgccggcacgagcgcatccacagcgagaccaagcagttcacatgtccttggtgcggcgccttctgtctgctgttgagtcacgccgacctttgctgactccctgcgcgccattctgcagcggcaagggcttcacgcgcggcgacgcgcttgtccgccaccgccagcgaggcatctgcatcggcagcacgatgcccggtgaaggtggcgaaggagacgaagccggcgacagctcatgatcggctcgtcgtctgtcgacgcacgccgtctcgcatttaaagctggcccacgccttcgtctttgccttctcttcgtcgccctctttcgcctcttcactttgtcgcctgctcggcgcacctttctactcgcatccttccctttctctctctcacacacacatcaacctggacgttcactctcttcggcccgccttgtttcagccccacgcccttctcccccaaccacctgttgcgatcccccacccccactttcttgacttataccacactctacgccggagccgcgctcgcaaaaggagagcgtctgtccgacagaaagcaatgcgggtgggacggtagaagcagagaagggaacagcgggtagaggacgatgcggcgggagtggaggtggcaagaggacagagggaagagtgttcgtgcgtggagagtcgagtgaggcgaggcctcgaggtggacttggatggaggagagcgatgcaagagaacggtgaagcatggagcgagacaacggtagagcgtacaaagaaagacgacggcgagggaatgctagagtgctcagcacgtcttgaggatggcctcgagccgttcgacgacggccgtcattgtcggccgctccttgggctcctggacccacatcttctccatcaggtcgacaatgtcggagccccactgcgtgtggagcttgtgaaccgacggccgcagccgctttgcgccgacgaggtcgtagatggcatgcctggcgagagcgtgaaagagggcggtcaactaccgcagtgtcgaagcgggcagggtgagggacgcactcattgctgccctcccaaggatacttcttctcggccttgtgccactggagcatctcccaaaagaccatcgcgcacgagtagacgtcgacctttgagtcgtactttgggtgggcggtccacatctcaggcggctggtagcagacggtgccgacgagcgagcggatcattgaccgggtcgagtgtttgacccgggcgaggccaaagtcgccgaccttggcgacgacgcgcgacgtaatgaggatgttggacgacttacactacgggttggaggacggagcacaagtcagccagggaggataagaccagagtgtgacgatcgacgcacgtcgcggtggatgatggccggcttgtgaaggtgcaggtactggaggccgcgcgagatgtcgagcatgagcttaatctgcaggagcaggagggcgtcagtcgggggggcaagtgcaacgggacaggagccgggccgagacgctacgcacgacaaccttcttgctcggcgccggcacgttgcggatgtagtcaaacaggtcgccgttctcgcagagctcgctgaccatcatgatcggcgtccgacggtcctcaggaatgcaaacgccgagaaacttgacaatgtttggatgcttgaagtcggcgagcagcttgagctccttgatgtccatctcgccgagctggccgcggaactctgcgatcgcaaccttcatccggctccggagcttgccgacgtagacgtccttgaagccgcccgagccaaccttctccatcttctggagctggccctcggggatctccttgtcctcgagcccgagcgactcgaggtcgaggttgagctcctcggcggcggcgccttgatgcgcgtgacccgagggcggcggcgtcggcgacgggtgcgtctgctcctggtggacgtggtcgccccggaggagcgtcggcgtcactttggcgtcggtcgcaaaggccgggtcgtcggcgtgcaggcgccgacccttgcgccggccaccaccggcgctgcgcgcggttgcgtcagaggtcgctgtgccggccgatgaggctgagcgggcggccgaccgggcgactcgggccgtgccgcgggacgatgtcgatgacggggcaggagaggtcacggccgagtcgtcgcttgcgacgttgctgtcgcgctgcagaacgggaaaaagaagggcacaattgtcagtgcgaagggcgagtggagtcgggcatgaggcaggcggtcgacggacccagttgataagggcctgagctagctgaggcttcgtccctgcaatgtcgagatcgcgcgtctcgcaaagccgctcgagcgcattgcgccggagccggagcagcgttgccgccgtgtgccgttcgagctcgatatctgtcggacgagtgaggcgcgtcagcgcgtgcggcaatcgagcagggcgtgagtccaacggaccctcatgcggctcggcagcctcgtcagcgccggccatctggacctcgccctcgtcgtcggcgatcgggccgacgtcctcctcgacctcagtgattggctcggcaaccttgagcgtccgaagcccagaccgcttggcggcgcggggcaggtcaaagacgtcgtcgtcgtcctcgccggcttgttcagccgcctcgtcgtcattgatcgcctcgtctcggtccgcggcaacgtcctcgtcttcgtcatcgtcggagggcggcgagggctgctggcgctcctccctcgaccgacgtgcgacccccgccgcccgagacggcctcagcacgagcggctcaatcgctccgccgccgccgccgccgccggtcccagcgttgtccgacgccgccgcccggctcgagcgctttgcccgcctcgcggtccgcgccgtcggcgagcggcggcgcgtacggccgcccggcgtgcgcgtctcgtgcgggtcgccgtcgacgtgcatctcgtccacgtcgcctgccccatacgcgctctcgtcgtcgtcgtcaccgtcggatgactcggcgctgtcgtcgtcgtcgtcggacgaggacgacgacgcgctgatgccatggtcgtcttcggaggacgtcccctcgccgagcttgagcgcctcgagcgccttggccttggcctgccgccgagggaggcgcttcacccgcccgccgctggcagcgctggccgcagcagcagggccggcggaacagcgccgggtcccgatcgtccggtgcgacgggcctccagcaacggccgagccggtcgactggctcgagccagagcgcgtcatcggcgacccgtcgccgccggcgccgaagggatcgtccttcgccgccgagctcgccgacgtcgtccgcctgtggctcgaccggcggacgaggccggtcgcccctgcagtagcagcagcagcaacagcggcggtcgacgagtgccggcgcttgggcaggatgccgatcgctgcccgtggggtcgcctcgtcgtcctcgccgtccgacgcaccgctcccaagcgagaccgaccgcttgcggccagcgcctgcgagccgaggcctccggcggccgccggtagccgacgcgcccagaggggtcgagactgcagctgctgctgtcggccgctcacgctctttgcccttggcggacgtccctgctgctgctgctgctgctgagccagacgcagaggacgagcctgagcaagcgcgggtcctccgctgctgccggatcggccgaccgtccgcctcggcagcagcagcagcggtaccggccaaggccgaggttgacgcagctggcgagagcggggcgtgtgggggcagggcggggacagtccgccggcgccggcgaggtgtcgggttcgagtcgtcggagttggaggctgatgcggagccgccgtcgccgtcgtcgtcgtcgatgagcgatgccaaaggagagccggctggagacggggtgaggccgttggccagccgattggctgatgagcgctgcagaaggggagcgtctcgtcagcgttcaggggcagagccatcagagcgaacgaaagcaacgcacagtgtcgatcagcccgtcgatgagttgatccttccgcagaccctcagcattcaccccgccctcgtcctcctcgtcctcctcgtcagccagcagacccgcgacgcgccagagccggacgagctcgagcttgcgcacgcgcccgagctcggcgcgcgacgccgaggagatgaggtgctcgtcggacgggtccatcaggtcgtacgaggcgatctcatcgacttcgtcgtcgtcgtttgctgacgcgcttgcggcgttcgaggaggaggaggaggtcgaggttgatgctggagaggtggtggtgagggcgacgaggcctaggcgggtggcactcgtcgagcgccgggcggacgaccgtctccaaccgccaaggctcgagccggccgtcgagcccttggcagacgagccatcgtcggcgtcgtcgtcgccgtcgattgccgttctcgcgccgacgatcttgactttcgacttgccgccggcagcagcagcggccaggtcgaccgccccgacacgctccgttaccgaggcggtcgacgacctgcggcctagcgagccggcgaccgccgcccgcttgcgcttgatgccggcgatttcggccgcgggcggcggcggcgacgggtcgactgctggaggaagggggtgatggaccatgctcgcgtgggcggcggcggcgcagcggcctgcgggcggcggcggcagggggcggcgatgcagcggctggttctggttcggcggcttggcgaggaaacgctgctggaggtccgagaggtccgagagcggtgcgcgggggttagggcgcatgcgggtcgctcggaggcgtggtgagatccggcagaggctgctcggacgaagcgcagtcggtccgtcgagcgagcggccgggtccagaaagagaacggcgaagatgggctcggggtcgggaagggctggacaatgaatgggtaggtggacgcggatgggagctcgtgcgtagtcggtcagacgacgtgagggcgacgtgtacccttgttggccggctcgagaggtggagggggggggaggggcggcacgcgcggagggtcgcgcgggttcgaaggtcggggcgagggcgagcgccgagattggcctcgagtctggcgatgctgcgagcagtatctggcgggagcaacgggcgtggcgctgtccctgtcagggcctggctgctgcagttgttgttcggacgaccggacggaccgagctcgtgggatggccgagggcgctggctgctgctctgacgacgaggcgcgcgcgcggacgagcaggcaagcggccaggcgggcgagttgtgcggctcgctgccttcgacgacggctgaaggatgcctgcttgagagacgtgcgcctgcttactgcttgacgtgctaccgagttaacgacgagagttgctttcggacctgacggcgtcgtcgtcagagggccggcaacgaggagcaagccggaggggctgagacttagacgactcttaatgaatggctgctcagctagccggcattcagaaactctactgcgcgcgcatgcccgtcgctccggacccgcctgtcgctccgccctcggccctaccctctcgcagcccagaccgaccggaacgccctgcgagcgagatggcctcctccaacctccctccagccgcagccttctacgtgccttcgctcccgacgctcgacacaccgctcaacgcgcacccgacccacccgctcaacgtctgggccggactgctcccgagcggcgatccgacgggcgcgagcccgaacgccggcggcgaggacgttggccagaaggacgacaagatcttgtgcgtttcctgctctcgcccggtgtgctgctctgctgctctgatgcgctgataggttggaaggggccggcccaagcgggggtcgcgtcgcgtcgaagggagctagtgcgcgagatggccggccgcctgcgctcgctcagggacaaggtctctccctgcctttcgtcggagagcgcgcctctcgcagcctagctcgcagcctaggaacggacgcgctgtgatccggcccgtacccagcgctgcccagagcggttatcggccgggcgagacgagggggtctgaccgagctgctcgggagaagcgtcggctgcgggccaggcggctcgcctcaagctagtcgtcggcagccgctgcagacgtcccgcccctcataccgggagcgcagagcagagcttgctcgcgggacctatcatattgctctcgatgtcgccaacgacatccgaagcgttcctcgaaacgcaacgcgcgagctgactgatctctccttcttcgaccccccccccacctcagtcagaccatctgtctctgtcagtggcagaggagcagagaggacggagaaactcaccgagccagtaagggtcgaccgaggtgacgcacatcatgtactgcttgctcgtcatgactagctcgtggtagatgacgtagtcgggcatgtagcctaggccgtagagggccgaggtcgggtggaggatgcaaggcgcggccgtccggcaattcatgtactcgccaatgcccttgacccgggccgcctgatggaagtagccggcggtgatggatttactgtggtgagcgggggcagcaaagagagggtcagccagggaagggatgggcttagcagagaagagggtgccgcaccgaacgacgtcccagtcggtgccgaccgagaggatcgcgagcttctggctcttcagaatgtcctcgagctgcgtccggacctcgcgcgccttgcggaggagctttgggtgcaaaaagtgcttcattgcccagtcgtcgcggtatctggtgacgagaaggaaacgtcagcgagagacgacgcaagccagcgcgaaaggggtaactagcacgcacccgttgctcttccactgcgtgtagacgtgcagaagcgtcaagtggtcgctctccgggacgaagaacttttcccgggcctggtcgctctcttcttggcgctcgcgcggccggtagaagaccgaggggactgagagcatcgagacgatggtgaggacctcgctcgcgcagccatagtcgaccgagacgagcagcatctttgcgagcgagggctccatcgggtaatcggacatgcgccggccgagtggcgtcaggtcgccgacattgtcgagcgcgccgagcacccagagctggtacatcgagttgatgatgttttcctgcggcggggggtccatgaagtcgaactcgagcgtgtttttgacgccgagcgacttaagcaggaggaccgtgttggcgaggtttgtccgctgaatctctggaatgttgttctcaaacatctcgttcaggaaggccatctcggtgtagagccggtagcagaagccggcgcccgtccggccggcccgacccgtccgctggccggcgttggcctgcgagatcggcgtgatctggagggcgtccatgccaacgcgggggttgtagaccttgagcttcgagtagccggcatcgacgacgtaaaggatgccgtcgaccgtcagcgaggtctcggcaatattagtcgcgacgatgaccttgcgccggccgtcaggcgtcggcaggaaaattttagcctgaaggtcggccggcatctgcgagtagatgggcaggacggcgaggggcggtgggtcgtccagcaagccgagccggtctgaagattacacgagagatcagcagaactacgtcggggtggggaggagcgaggacggcgcaccttcgacgacgccacacgtcacctcgatgtcctcctggccggtcatgaaaacgaggatgtcgcccggcgggttcgagagatggatctggaggacctgcttgacggcgctgtcaacatagtcctcgcagggcgacttgctgtggaagatttcgacggggaacgtccggccggggattgtgaattctggcgcgccgctgtagaagttggcaaactgggtggaggcgacggcgaagtcagcggggagatctccgttcgtttgcgccgatgaggacagaccttggcagagttcatggtcgccgaggtgacgatcagcttcaggtcacgtcgccgggtgagaactgtcggtcgagaggcgccaacgtcagcgaattgacaacaaggttgagagacggctggagggcgttctcactcttcttgagcagacccattaagacgtcggtgctgagtgaccgctcgtgcgcctcgtcgaggatgatgacgctgtaccggtcgaggtctccctcgttaagcgactcgcgcagcaggaccccgtccgtcatgactaccggagaagacgaggggccagcagtcagcgcgcgtcgtcggccgctcatcaaacgggagggcacagcgacctacacttgatcttcgtctcgggcgaggtgcagtcctcgaagcggatcgcgtagccgacggtcgacccgagcgagacctccatctcctcgctgacgcgctttgcgacactcatggcggcgactcgccgcggctgcgtgcagccaatcatgccaaactcgcagtagccgtcctcgtagagaaactgcccgagctgtgtcgtcttgcccgagcccgtctcaccgacgacgatcgtcactgtagcgaaggaggaaagcggtcagtgcgtgagggagagagccggaggagtaaggcaggcacgcaccttgattctcgcggatcgttcgcatcaggtcttcgcggcaggcaaacgccgggagatactcgcgctgctccttgagcgacttagtccgcgaaaagttggaggcgccctcgctctgcttcatatgcgaggcaaactttgagtccgacttgtagtcagcctggccgtcgccgtcggcctccttcttgaccgctccgccgggcggcacgccgttgacgttgaccggcttgccattgacgtcgacgtcttcgccgttctcgccctccttgatgcccatcaggttgccgagatttgtgccgccgatcgaggccagcttggccgccgccttggcgcgctcctgctgctcgcgccgctccttgacgagcgcgctgccctttttggagaagacggcgaggtcgctcgttccgtccttgatcgggttgattgggtcgagctggcgcgtaaaggcggtccggccgtcgagaaagggcggccggaggtcatggacgaggacgtggaccttggactcagagtcgtcctcaaagtccatgtcgaccgcctcgcgcgagccgacgccagaggtgtgcatccgattcttttcccacatgtcgttgtcggcgttctaaggatgcggcagagagggtcagctaatcaggctggcgagcgctggaaaggcatcgcgaggggtgaaggagggacgcacatattgcgcttggcgggcggttaccttccgcgtcgccttcttcgcaagttccgcttcttgctgctggccgaggtcctcgtactgggcaaacggattgtggtcctcgtcgccagcctgtcctgggcgtaaagaagggtcagcctcattcaagcgtcaacggacgagcgcaggcacgcacgacgtcatcctgctcgtaccagtcacggtcgagcttgacctgctcctcttcccactcgtgctggttgggcgtaaaatccggccgaaccgacccgcctcgctcggaccgcggcgtcgcctcccaaccacgcgggccgcccgagccctctcccctgctgccactcgcccgggcattgggcgtctcgtcccagccgcggttcggcacgcgggcgctgccaccaccgtaggcagaatgaccatcgccgccacgctcgctccgaggagtcggtgcctcctcccagctccggctcggacccggctggccgcctcgtgcaccccagccgctgtcccggcccccggtcgactgcggcggcgggccgcctcggcccggaggcggcggcggtggcggcgccattggccgggcgtaccgatcctccttgttcaggcgattcttgaagtcgccgagcccacggacgggctcggtctggtgctggggtgcgaccgagatgttggcgccctcgcgctgcttctcacggttccggcggtgctcctcgagccgctgctgggcggtcgagctcaggccggggccgtgcgaaggcgtctcgggcccgcgctgacggatgttggcggccctgggaggtagagtcgggactgagggtcggcgccgacaatcagcactcaactcgagggtccgggccaatctagaggctccctaacgcacccttgaacattggagcctcgcccgtgtcgacgtcttgctcaactgcgagcttagccttcttgctcgagctccgaccctcctcctcgagccgacgcttggccgccgcctcggccttcttctgggctgccaggcggtcaagaccgagcagcgaggcctgcggagcgtggtagcggtgttgctggagagcaagatggcacaacaggtcagcaccgagagcgactaaagagcgccagacgaggagcggtatacgtacagccgcacccctaacgagaccgcccgcccgctgctcctccgtctcgagcatgtcgggcccgtcctcgtcgtggaccgcgaagccggcgacggcgagccggcccttcttctcctcctggctgagatggacaaggatctcggtgtggagttcctcgacaagctcttcgctaaacttgccgaacgctgcgatggcccgcttgaacgaggcgaccgtcgcatttgtccgagcgatgtcaatgacccggcgggcgaggagctcgttgacgctgatcgagttaagggcgcgcgagagggcgacggcgacgtggtgaacgaacggctcgccggccggcgtgctagcgtccatctttgcgcgaggggcccagttgacaggtcgagaggccgcgcctgtagaagaggagagcgagatgcggtggacgttgggagagagggagaggtgaagctcgtgctgctccggttgagctcgctccttcctctctatcagaaacctgcccgccaaccctccaaccagctcctgccctcccgaccacctttgcaacccacacgcttgacccaggatgactgaggctgccccttcgcacgccctctcggcttcgaccttcaagcggctccacccgcaggcctacttcaaccgcttcctgccgcacgccttccggccagacggccggccgctcgacgacgacgaccgggcctggcgcgacgtctcgatcaacctcggctcaatctcgaccgcgagcgggtcggctctcgtccggatgggggagacgaccgtcacctgcggcgtcaaggccgagatctttgagccgaccgtctatgagcccgaggcgggctgtatcggtgcgtccgcgatgagctgctctcgcaggcagtggcggccacagaaggctaaccttcttgtcggctgctgccagtgcccaacgtcgacttgccagcgctgtgctcgccgcagttcaagcccggaccgccagccgacgaggctcaaattctgtcgtcgcagctgaaccgcatccttttgcagtcagtccctcctcgcacacccccttgcgctgcgagccttcggctgacgatcgtctttccgcccttgccagtccgagtgtgcttccgctctcgagcctcgggatagagtctggccgggcagcctgggtgctctacatcgacgtggtctgcatcaactatgacggcaacgcgcttgatgcgtgcctcgtcgccgtcatggccgcgctgcgcaacagtacgtctccagcgcttccatgtgcgcttcccgagtggctgatcaaagtctttcctcacttgcacagctcgcctaccgcaggcaacctgggatgacgagcgggcgcaggtcgtttgctcgcgctcggccccgacacggccgctcgcccttggtcgagcaaacccagtctcgtgctcgtttggcgtcgtcgacggccggacggtcctgcccgatccgacggcgtttgagtcggccctgctgacgtcgcgcatcactgtcgtgctgctccagccgacggccgaggccgagccgagcaaggcccggctgctgttcgtcgagcagactggccttggcgggatcgttgggtcggcgggcggcggaggaggtgtcgggacgcaggccgtcctgcgcgagtgcgcaaagcgggcccgggcaagggcagtcgtcgtccaggagctgctcgagtcatgatgcttctttctcgtgtgattggaactgggctcgaaggctcatgttgacaacgggggcggtgtgagggctacagtgggagaggtgagaaggggggcgggcgaccgcgctactccttcttgttgtaccagtcgtcaaagccgaggtcggtgccaaaagcgggcgtgttgacgcgctgcgtcttgcccttcttctcggcgagctcgtcgagcgtcttgacctcggcctcggtcaggtcaaccgtctcgaggttcgaggcgatgcgctccttcgtgaccgacttggggaggacgaccacgccgcgtgcgacctggtacgagatgaggaccttggccgggtggcaacccttggcgtcggcaatcttcttgatgtcggggtcgccgagcaggggggagtctagagtaagaagaggaaggatgtcagcggcttttgcggtgtcgacctcgaggcgaacgggacgaactagtagagcctaggggcgagtacgctgaggaaggaaagagcgggagggtcagccaaggcgtgctctcttgctcgtttttgagcgagcgaacgagggctggctagccgggtcaaagggaagggaagggctcgagaggagcaacaacgcagggtggcggctaccggcccgcccgctactcctcctcctcctcctcctcttcctcctcctcctcccccccctgcagttcccccgacacagcaagcaagcgagagcaaggacagaccttcgaggagcatgccctccttctcgcaccactccttcagcttgtgctggggcctgcggcggggtcaagggggcggtcgtcagactttgcggcgcacgtccagggtaggacgatacgcacaggaacgggtgaagctcgacctggatcgtgacgccaaaggcggtcagccatagaccaggtgaacgtggacaagggagagcatgggcgcacctggttgacggccgggacgaccttccaagtcttcttgagcttctcgaggtaaggaatcgaccagttggagattccgatcgccttgagcttgtctgtttgcaggaagccggcgtcagtctcattctggcggagcaagtagcgcccagtcggacccgagggcaaagagcaggaggaagcaggcacgcaccggtccgctcgtagatctcctcgagctcggcccaggacttggagatgtcaaagtcgaggtcagtcgcgcgcgtgccgtcggcgttctgggggaacttgttgtacttgtccgactcgggggcgacgagcttgagcggccagtggatcaggtagactggagggcaagagaggagaagaagggaccgcgaggatcagcagagctggtgtgctgcgcgcgcggaacagcggctggacggacgatcaaggtagtcggtaccgaggtccttgagcgtctggtcgaggcactcctcgatgcggccgtcgaggtaggtgagccagacctgcggggaccgagcaaaggagcaggtggagtttagcggctttaaactcggttctcggtgaccccggctgaagggggtggggttgacgcggtcatcaaagccgggcagcgggaaaaaaaaggagggactgaccttgctggtgataaagatgtccttgcgagggacgcccgaagccttgatgccctggccgacctccttctcgttgccgtagacggcggcggcgtcgatgtgactacgcgtttttcaagtgatgacgagtcagttgggctggtgcgagtgcataggcatattcctctcgcaaacataccggtagccggcccggagggcagcctcgacggcagaagcgcactcgccaggaggcgcctgccatgttccgaggccgatggccgggatctcggcgccagtgctgtcgtggcaggagaagggagggcaagggcagggtgtgatggtcaggggttggtatgaggtcgaggcggagagttcgctcgctctagagaacgactgacttgagcttgaagttggtagggtatcccattgtagtctaagaaagaggagggtaagggtaaggaggtggtggtggtaaggaggaggagaagatgggccgttcgaccgacctgttcagccctctttgccgtcggcagccggcccggacctctgcttcctccgccgggccctcctttcctgcattttgatgcagatctagagggttcggagaacgccgtccctcaacctcttcgtccatccgacggatgcgcacgaccccacgcgacgccccttctgccggtacgcgcgagtcgatgcgtcggaactggcaggcagctgatgagtagctgcggcaccatgcggatcgtccttcgcgtccgacgaccaaagctggcgacgattagctcgcccgaaacccgactggcccgttccagaaatagggtcgaccgtgccttggccctcatctcccctccaacgtcgacccttctcctcctccttcacccagcagcatgctctcctcttctctcgtcgctgccgcgctcgtcgccgccatcggccagctggcctcggcctcgcccatcggccaggcgcccgccctcggcgcgcgcgatctcctctcgctccagcgccgcaacaacgctaactcgtcgtcggccgacaagccgttcgtgctcgagcatcacctcggcaacctcagcccgtactggacgcccccgtccgactactcgctcgagctccccgagggatgcagtgtcgtccaagcctcgctcatgcagcgtcatggctcgcgcaacccgctcaagtcggagctcgtctactcgcaaaacgtttcggacctcttcaactcggccgagggcaagcgtctgctcgcgaacgtgacaggcgacctcgaattcctcaagacggtgcgtgcttccctggcgcagccctcgaaatacatcggctgaccctccctctgtctgtctccagtggaccaacaagctcacgcacgatgacctctcgccgatcggccgggcccagctcttccagcacggcgtcgatgtcaacctcacataccctcacctctacaccgatacaatgctcgtcggcgaccaggaccgggtgtgcggcctcctcgctcgctcgcggcccctccgcctgaggctgacccctctctcccgccagcatcgagtcggccgagtggttccggatgggctactacggtcggacttacgacaacgtctcgaagatcgagctcatcgccgaggatgaggttaccttcagtccaatcacagccatggataactgcagtgcctgggagtactcgtttggcctcggcgctgtctcgacctggaacgccgtctacctcccgccgatcgtcaagcggttcaacgagctcctgccgggtttcaacttcacgcagaaccacgcccatggcttcctctacagctgcgcctacgagttggcgacgctcggctcgacgtcttggtgcaagctcttcaccgacgaagagattctcgactttggtccgtcatccttcgaccctttgaagagaagcctgttgtcctgaccacagtctttcgtttgatagaatacgagcttgacctcctcatgcgcaacgcctttggttacggcctgcccgcgccactcggcgagacgattggctccgtctacttcaacgtcctgctcgaccgcctgtcgaacaagactgggaacgcaagcgacctttacctggagtttggtcatgatacgacgctggatctgctctttaccgctgctggtcttgtcaagtatgtcctcctgcgaatctgcttgtcctgcctctgctgacccttttccgtcacctccttccctctgcagcgacatgagcttccccgcccaaggccccgtcgacccgaaccggctctggcggacggcccaccaggtccccttcgccgccaagctcgtcagtaggctgtgactcagcatgtagaggtgcttaattgacttgactgaaccctctctcgacctccagatcaccgagaagattgtctgcccggcctcggccgccaacacgactggcgagaccgagtgggtccgagtaagtaaccctaaccctacccccaaacccccctatacctaccatcaacactaacccccctttacccctaacaaaagatgttgctcaacgacgccccgttccccctcacgacgtgcggcgatgcaatggacagcaagactggcgcctgcccgctctcggcctttgtgcgtcggcatccctctcaagtgcttctaacgcctccgctgacattccctcgcccatttgcacgcagattgcgacgacggccgccgtcgcggccatgaacgtcacctatgccgactacacggaggtctgcgagcgcacgtacgtctgaagctcactggtcggcgagactcagcatgtcttccgacagggcgggacggtcgtgtctcgcgcgggcgcttcaatcacaagggcaaggcctgactagaagcgggtcctgtattggccggttgtaaatcaatgccagtcccgctattccgaaccatactttcccttgccagcaggcaagacgatgcgacagggccatgagtatacaagaggaggaagcgtgagtcctgagaggagcgtctacttaatgttcttgagccgggccgtgttgcggaggatgttgatgtcgaggccctcggccttgtcgttgatccggttgagcctctcgttgtgcgtgttgatctcgtcgccagcggccatcgcgagtgccttgagccggcgcgtgacgtcgagcgtctcgtcgaggttgctgtcgagctcgtcctcgagctcgtcgtccgactcggtcgcttcaaactggtagcgcgagcgagcctcctttttggcttcagctgagacctgaccagcgtgcgcggaccggtaggccgacgtctcgccgagccggcggtcgttcaggcgctgggaggagggtaggggcgagactcatcagccgaccgcgagagagcacaagcaacgaaaatctttgcgaccgcacctgctgcgtctgctggacgtcgagtttggccttggcccgctgcgacgtctcgtcaatgtgcctgtcggtgatgcgcttctcctcgaccatccgcttggcctccttgttccagacaaagcccggccggagcatcgaccggttcaggtgcttgagctcgttcgtcttgtcgtctgctcgcgagcttgccgccttggacatgtcgaggtggcgttcggtgttggcgatccgctctgataggaatgaaggagaggccagtcagcgtcgtctgcgatgccgctccccggtgctgcgcgcaagcagtgacagccgcttgtcgctcgagggcgcaacgggacgtacccgactggtcgccgagcttggagagcgtccctctcgccgtctcctcggcctcgcgggcgatccggagggcgttgcgcgtcgagccgagcgagtcctgcttggcgccccggatgtcgcgcttgatcatctcgacctcctcctcctcgtcctgctcggtgccgccgccgctgccgccgccgctacctccctcgccgcccgcaccgccggcaggcccgtacgggtcggacgagtactgacgcctcgcgtccgtcttgggcagtgcgtccgggttgtagcccgcaaagagggcggcccgagtcgggtcgctctcctgggcgagccgcgcccgatcgacctcgggccgtgctgcagcctgacgagtcgccgctgctggcgccggcgccgaacgaccgctgctgccgtatgggtcctgggtagcgtacgacggcgcgatcgatgacggacgctgttgctggccgccgccggtcgacgggcccgagccaaagagctggtcacgggcgctctgggcgtcttgccggccaggcggaccgccgccggccgagggcgactgcgttcgggcgagctcgtttggcgggagcgggatcgcagacttgtccttcttgctgttgaagaagcccatcgttcgtccgttcggcggagaagctgagtgagtaaagggaggacgggtggtggtggtgggtgggagatcaaggggaggaggcgaggcgagccgtctgtcgctcggcccgtcttgtctcgccgcccggcaagggtggatgcacagcctgcagggctgacctcggccatcgcctctaggtcgggcatttatcaaggcgagaagatggccgcggccgtactgacagcctgcctcattgctcctgccctcacggacgctgttgctcgggaagagggcggatggccggctctcgtgctgcgcggtgacgagacttgaactcgccctgctcatccgaccgagcatgctcagggcaactcaggatgctaatcaacgacttgcgcggccgtcatttagatcgcctacccctcttctacttgcgcccactgcccttcccccccttgcggcccttcttgccgccctcgcctccactcgtgacttcgtcgccgctcgtgcccgacgtggcagccgccgccgccgccttcttgcgctggcggagcagatgctcaggtacccactcttcgtcatacgccgtcgctgaggccgggtagggcttgtcggccgtctgcgcagggacgacaaccttgagccgccggctctcgccagtcgtcgacgacgcctttttggcgccctgccggccgctgccggaaggcggggcgaggaaggcccggtaggcgagcgaggcgccgtagaaggcaattaggctgaggagggcgtagaggaagaggagcgaggggtcgagaaacgacgtcggcggctcgacaacctgcagggggcgagggcggcagcggcggtcagctttcaccaaggggtgaggggaggtaggactcgggattgtcgagcgccaggacggacattgacggtcgagttgaaggcggtgatgcggtgcggggcctttccagcgtcgagcacgtcgacccagaccgtcaggccaatctcgcgcggcttgaagtctgagtagacgctgaacgggagcgagacgttggacttggcgaggacggtcgttgcgaaacgggcgtcggacgcgttccggagcgtccgccaagcccggtcgggatcatggaaggaggccgaggcgccgacgagggtgatgtcgctcgaagccccgttccggaggatgactggcgggtcggaggaggaaggtgaagagatggcgggcggccgtacggggagcagggcgcgtgggagggaaggacgtcagcccgggcttcactcttgatcagccaaggtcccttcgagggagcacgcactcttgagcgggttctgctggccgttcgcgacctcggcgtagaggccgctaccggggaactgggacgggccgccgacgagatggccgggacgaggaggggaggcacgcgagcagcgaagttgcaggaaggggatgacgacgaagaatcagacccgggatgactctggcctcgcgctctggacacgtaccttggcgacagcctcaatgtagtcgatcgggctcatgctggcgggaggacgatgctgggggcgggtcgacgttggaagggtctcggagctctcgtctctctcgacccctttgaccgtcatccctcttccttcccttctcttactcacctcctcttcaccatggcccccatcctcgacaagataaagcaggccctcaatctcgacggctcgtcctcgacgtccgagtcgcctgccgctgccgccgccagcagcacgcctccctctgccgccggccagtcgagcgcgacggccagcccggccgacgtatcgaccgcgggcccggccgtcgatgagacgcccgcgttcagcaaggacgaggttgtcgtcctctttgtcctcggcggacctggtgtcggtgcgtgcggctgccaggctgcgaaaccggcctggctcgacctggggtcctccccccttgctgccgcatgctgacgtactctggcgctcgctcgtcctctcaaccctctcgcaggcaagggcacccagtgcgcaaacctcgtcaacgactaccactttgttcatctctctggtccgtcgcatcctctgtctgtgccctcttcggctcagtctcaagtctctgatgctgctgctcgtcggtccgcaatcagccggcgatctcctgcgcgccgagcagaaccgcgagggcagccagtacggccagatgatcaaggagtacatccgcgagggccaaattgtcccgatggaggtcaccgtcaaggtccggtcgagttcgggtcgtgtgccgacctttctaggcagacgctgagaaccgccacctttgcctgcccgcagctgctcgagaatgccatccgggacgctctcaagtcgccccctccgcagtgggcctgtgcgtcgtcaacccccctcgtccttcccgatcgctagctgatctacccctgttttcaaatccccacagcgcacgcgctcacgccgcgcttcctgatcgacggtttcccgcgcaagatggaccaggcactcaagtttgacgcatcggtctgcccctcgcgggcggtgctgttcttcagcgcgaccgaggacgtcatgctcgagcggctcgaggagcgcggaaagacgagcggaagggacgacgacaacaaggagagcatcgtcaagcgcttccgtcagtcgtctttcttccctctttggttgacataaagacggcgatggctgatccgtgtcgtgtgcgttggatccgccagggacctttgtcgagacctcgatgccggtcgtcaagtactaccagaagagcggcctcgtctacgatatcccagcctcgggctccaaggacgatgtctatgtccaggtccgcaaggccgtcgacgagattcttcagccgacggcggcggcgacgccggctgctgctgctccggctgcagttgccacgccggtgtcgacgtcgaccgatcacccaggcatggttcaccttggccccatcgcctagccttgctgctcgctttgcacccgattagatgtcccagcctggcgccgaacaacgagcagcagcatctaatcgtccgcccgaccgacgatggcctctttgagctggccgagcgccgcctcgtacgccggccggagcgcatcgaggtccttctcgtccagtacgaccttggccaccttgtcgaggtggctgaacgaccgcatgagctccttgaagtgccgcgcctcctgtgtctcgacgagcgaccaggccgagcccgaccggccggcacgagccgtccggccgacgcggtgaacgtacttgcgggcgtcgatcgggacgtcgtacgagatgacgtgcgagaccgaggggatgtcgataccgcgggcgatgaggtcggaacagacgagactgtggtaagggcaggggtgaatggaggtaggtcaactaggcccgcgaagcaaggtcaagaagttggatggaggggcgacccacatgtcaatctcgccctttccaaaggcaccgagcacgcgtccacgctcgccagccttgccgccgccgccgaggtcactgctgtaagcccggacgacgagcgccttaccgcccgtctcgcgagcgtgtgcgtcttcgaagaactggagcagcttgacgagtcggttggccgagtcgaccgacttggtaaagacgagggcgttggcgatgggcgcggcggcggcgtggaggagcgaaagcaggtagagcggcttggacgaggtcggcaggacgacaaacgactcctgcaagggtttagaggtggagaggacgatcagcgacggcctcgaccctgccgtgccgtcgaaaggatgctcgctacgaaccttgagtgtcgcggggacggtgaacgactcctctgcgtaggctccgccctcctttgccgcatcgcgatcgtcctggatgatgaagtactgcgggtcgacgaggttgagcgcggcaatcttagccgggtcgcgcgtcagcgtcgccgagaagaggagcttctggcactggttgaccgaggcctcggatggccggccctcccaagcgagctcgccatcgccgacggcggtcgaggccgactcatgcgcggcctcgcgcgtgcgggcgaggacgatctggagccagtcgttgaagctctggttgagcaggcggtcggcctcgtcgatgacctgtcggacgaagcccatcagcggcatccaaagcaaagcgagtgggcatgacaaacgcacgaggaagcgcaggtcgcgcaggctaaagccttcggtcccggcgaggtggtccatcagccggcccggcgtgcaaacgaggatgtcggcgagcgagccgcccgtgtgtggatcgatgaggtacgactgctcggtcgcaaacccctgcgagcccgtgacggtcgcgagcttgagtccggtcgacttggcgacggcctcaaacgtctcgcgggtctgcgagacgaggtcgcgcgtcgggaggatgacgagcgcccgaagccgggtgacgacgcgcttctggaggacctcgacgatcgggacgacgtagctgagcgtttttccgcttcctgtcggcgcgctgacgcagacgtcgcgctgcttgcggagcgggtagaggccggcgacggtgctcgcgccagagggcgtgtcggccggaggcggcaggagaaaagggatgacggccgtctggacggcaaagaacgagctaatctggaggtccttgagccgctggagaacccgggccgagagcgggacggggtccgacgctgttgccgacgcctggtcgggcagggggagcgagtgcgagaacgagacgagctgcgcggtcgaaagcgcgtgcgggaccgtcaagggatggaggaggtcggccgtcggctcgggcaccgtcggcggctggtgagggaacggctcgagagggagcgacgtgctctcctctggcgaagcggaccggcgcgatgctccaggggaaggagagcgcgagccagagctcgacggcgctgggctggcgctcctgctccggctcctgctgcgagacgatgaggcgacgggcagggtgtcaactggcccagaggcagaagcaggggccatctcgacgtcatccttttgctcggcctcagctagacgtcggcgcttcttctccttcttgcgctccttgcgagcctgccggtcgtcggccgtctcgacctggtcgtcggcggcggcagaaggcttgctcttgcgcttcttggccgggagctcagctgccggctcggccatgacgacgtccgctgtgggcggtagcgctggagcagacttgccctcggatccatcatcgctctcgtcatcgtcgtcgtcgtcctcggcagcagcgccggtgccggccttggtcgacttgtcgccgttgggcgcgctcgcgacggccgcctgcttgcgcttcttgcgcttgctcctctccttttttaggtagcgcgccttggcgaccgatttcgctttcgtcgccggcgtcggggcctgcgggaggaggaccatgaccgggaaataggagtgagaggtcgaggagggaatgggggatgagggaggaggcaaggggcgagggcgagggcgagcttcgggccctcgaaattcaaggccgcgcagtcttccgcccttagtcgccctgaccacccgaggacgacttctctttcgcgtcgcaaaggcaagtctgagcaggccaaaacgacaaggcaaagcgagtgcgcatagatcaatgaagaggactgcagggcggctttcgcgtcgcgcccgagcgtagcggccggcgcctgccccctctcagaggataaattggacggtgacgtcgatcgggtgcgacgacgacagctgcggcttctggctgtactttgccgagaggatcgcccggacgttctggagcaggacctggtacgagacgttgggattggcggtaagcgcctggatgaaggcgtacgacattgcgccggtcgccttgccggcctcggttgcgtcggccgacgtctggtcacgccaaggggcatggagggtcagccaggtcattgccagggaagctctgagagagagaggacccacctgctcgtctttgcagccagaaaaggagatgacgtcggccgggctggtctttgtccggcgcgtcttctcggtcgcgcccgactgggcgccgctgacctgcttgaaggtcgacgtcaggctcttgaacaggccacccatgtcgcccttgaggtatgacatgcctgcgccaagcaaaccctgcccggcctcggcgagcaggttgggctccttgatcttgccctcggtcgagtagacgtacggcaggtcaagagccgtgccagagtggcacgagtcaaagatggccgtcagccggacgcccggcgcgagcggcatcaccatcagacggtgcatctcgtcgtcgacgatctggccggcccgggcgtggtcgaccggatagatcgtctcgtcatagccgtcgtcctcgtcgccgtccgtgtcttgcgcctggccgccgtggcccgaatagtggaagaagagcgagtcgttcggctgggcgccctggacgagccagctcatcgcctgggtgatgttggcccgggtcggctgttggcgcgggttgcgagcgtcgtccgtcaggacgacaatgtcctcctcgcggtagcggtgctgggtcgagatgaagcgcttaacgttgtggacgtcgttgatgcaacctgtgatgggtgtcgcaaacaaagggaagccagtcagcaaagtcggcagacagaggaaggggagccagctagccgaggcggcacatgtcctcgcgttggacgcccttgtcacggcgggacgcaccccggagctctgcgctcgtcccggcatagttgatgccaatcagcagcgccttgcgattgcccgtgcactgcgagtactggaagaacggctgctgctgcccgccgttctggccctgatactgcggtccgtagtgctgcggctgcgagggcggcgcatgcggcgctgggcccggaggggggatgtagtggcctggtcctccgccgggcatgccgccgccgtagccgccggcgttgtagcctccctggctgtaaaggttcgaggcgagcagagtcacggcagtcagcttccaggtcaggtcagatcgggtcgagcggagggcgcacgcagggtagcctcctcctcctcctcctggcggcctgagtggtgcagcacagagtcaaggcgtcagcttccactagatgaagcctagcagtttgtccgccccgtcacagtcacgcaccggctgtactggttgactgggggcggcccacctccggctgggtagaagagaaggagcgcgggcgagcagcgggcgcagtcagccgtcagcgtgaggccatcaaggccagaggaccggcgatagtcaagatagcgagaggactgacgaggaccatagccaccaggccctccgtagccaccaggcggaccaccgtagctgcaaagcgagacagacggtcggggggagggggagggggcgtcagccgagctagagctctcggagaaagagcgggtgaccgcgggcggccagagcacgcaccctccctgctgttggtgctgggccggatactggggctgctgctggtggttgccggggtaggccgagttggagccgtggtgcgagctgtggtactgctgtcctgggtaggccatcgtcgctgacaagacgggatgagggttgagagtaagggagcagaaggagatgcggccgacctcgcccttcgtctcacctctgtaccgccatcctcccagactcgacgccatggcagaccgcgtcaaggtgcgggtcagacagcttgccagcacagttccctatgtctgctgaccctcctcgcttcgcgcttccagggcattcaaatccatcggcccatcgtctatggctcggtcgcccgcctgctgacgccgcaggagcgcgcactctgcaaggacccgaaccgtctgtcccgggctgcacccctctctcgcctgctcttggtctggcgaggctgacacggttctcgctcccagacacgcatacctggaccgtcttcgtccgctcggccgcctcgcccttagtggacagcaagagccgcgagcgcgagcgctcgctcgacgaggagctcctgcccggaggtgccgacgacatgagttactttctcaagcgcgtgtcgttccgacttcatgattcgtttccgacgcccttacgcagtgcgtgatcgttcttggcgctgctttgagaagggatcaggccggctaattctcgctttccttgcctgcctgcgcgcgtcgcgttgtccgccccgcagacattgaccgccccccgtaccaagtgaccgagacgggatggggcgagtttccgcttcagatccgcttaacgttcatccaggaggccaacgagaagccgatccacatcgtccacaacctcaaacttcaccactacctgccggtcgtccctgcgccggtccctggctcggccgaggccgcgagtgtcggtcaggcggtcccggccgcggaggcgggccagggggcagagagcgcgacgccaatggaggttgacgtcggcgcggcgacggaggtcgcaggagtggcgctggtcacaggcgtcgccgctcagatgacgggtgctgggcagaccaaggtgcgcgctacgggtggcgacgctcggcgacaactctacatactgacgagcgcctttccaatcgccaggtgatcgaccccatcaccgttgacaaagagactgacaccgtcgagctacccgcctcgagcgcgccggcaatcccagcttcggccggtcccgtcgtcccgccgcctgcgcccacggcagctgctgacggatccggcccgtcgaccgccggaccctcgactacggtcggcacgcccgcggccattgccgtcgacgtcactggcctcgtcgacaagacgtctcttgccgctcaggcgacggccactgcgcctggtgcacccgcagccttccccgccggcccggtcaatgcgtaccagtatgacgagcttgtctttacgaacccgaccgcgccgttcctggccatcctccaggcccacccaccgacgcctctccctgtccagccgcgggtcaagggccggctcgagtttacgctcgggatggaacgcgaagagggcgagcggatcgacgagggccggcgcgaagtcgtccgggagacggacgcctggcgaaagcgcctgatcgactctgagcgcgaagtggcgcggctccggcaggaggtcggcggcttctgagagcatttactaagagaggtccgtctcctcatcgccgttcaagtgccagcgcagatcctcacacgccgctgtcacatccagctcgtttcaagcgctcacccgcgcaggtacattctcggccacccttacgcgacggcagcctaccccggccgcgaggcccgtacagtctgctactcgggccgcgacggagcaccgcctgccgctcgaggcccagccacaaggccgctcgacacgtcgtccggcgtctcaacagcgcctggacctgtcagtcctagccggcagttgttcgcatacgcccacgagcacgcaacaaagaagctcagctttatgctctatgccatcttggaggatgataatgagtcctttgcgctcgttacccatatattgtcgatcgttgtgtgtcgtctagctttcgcgctcttcttcctccgccagctcgcgcgccagcctcagcagcagctcttcagcgctctcgtcctcgtcctcgagcggactcgctggcacagcagacgagcccgcatagtcgggcgagaaccagagagcgctctcggggccgtacgagatggtcagctcggtgttgggcgggatgcgtctctgtgtcagcgggcggcgaggcgggtgcggatggacgaggttgtcgaggcggagtcacacggttgatgcgggtgtcgcgacgtcggacgcaaagcagttgggggttgaaagggcgaagagaggtcgtttcaatggaagctgcgcttttcggtcgagcaaagaggcaagatgagaagacggactgctgtgacgaagcgaatcgtctcggatccgagatcgcggacatacgagacgttgggcgtcggcgagtgattaaacatgctccctgcgtaagtcagacgaactgattcagcctctgcgaaaacgaagtcgtgagcgcggctccctttcgacagagcgcgcagactaaccgattccaaaagcgaccgccatcgacccgctccggccccagacgaacgcatagtggtcaagcgccgtcctcctgccgtgcgcccgccactcctcgcggccgagcacgagcaccggcgccgtctcgatgacggtccccgcggcgagcgtttgggatgggccggtaaagacgccgcggtacgtcggcggtgagcgggtgacgaggagaaggccgtgcgggttgagcgggtgtggttcgggcggaggcgagggagggcggctggactgggcaggcccagctttcgatctggaggttgaggtcatgtcggagggagggcggaggtggtgatagggtgcgggctggcttcagagaagcggtcagcgggctgtcagatcgagcaagacggcgaccaagttgtcagcagccgactttgagagctagagggaacgaaggcgtgacctgaagtcacagcttttgggtcgagggctgcccgtcgtcttgtcgggtcgtcgtcgtcgtcggagggtgcggctgagaagtagtggcggcggcggcggcggaaagcgagttcctcctcctgccgtcggggaccaaataatctcgcatgacgcagccggccggccggcagttgacgaccttcgcagctcgtccaggacaggacagcagcatcagcatcagcgtcgccatctaaacctgctcgcgttgcgccgacaaagagggcgctcggtcgaggactactgaggggaaaaaagcgctcgctcaccccttcggacccgaacggctccacagctgtggctcgccgccgacagaccgccccctccgacgacgggcgccatgcgcacccttgcagttccctagccagctggcctgctcgctagggcagcccagatgcacatctgctcgccggcggcccacgcgagcgtccctccttggactcctgctcctgcttggcgccctccgagcggtcgggcccgggaccggcgagctccttcaacgactgacgaggcgcggtgggtcaccagcagctcgcccttgaaggtcaaggagggcgacatgaggttccttctcgacgctgcatcatctcctcggctcaaactcgaacgtccagcatgaagctcactgcgagacctcttctcgccctcggtgtcctcctcgcctggccaagccagctcgtctcggcagcacacctcgctctcgccgcccgcgccgacgtccccgtgatcagtccgtccgtcttggcctctgattaccctctccatctcgctgacgtcgcctctcaacattccctctctcgcagccgtcagcgacaacatcagcaaggccggcaaggttgtctactgcgagcccgtcacctttgtccgtcccgacagctccgtctccttcgcaccgactactatactgacatcgctcgcgcccgcaaacagaactgggccaacgccccagccgacgtggcgtcgacgatcccgctcaacatccttcgcatctccgtcttcaacgagccgcccgccgactttggctcggcgctcggcaattcaacccgactgctgtacacggccgaggagcgctacgttggcgagagctggacgtgggtgcccgacctccaggccggccagcgctagtgagtgactgagcgatctggcaaagctcggcccctaacccgttagccgaccgacccaacgcagcgtcgtccagatcgacaacagcagtagtgtcaggcccaacacgtctgatgagtcgtggggctacggcttctccggcgtcgtccagaactcgtcgcggccgtgcaagtccggcctctccactcgtccttcctcctttcgagagcggccgcagctgaagacttgcttcccgactttgcaaactgacctcgtcaccctgcagccagagcacgtacgttcaatcgaccttcgcccacgcgcagacaaagtgaactgacctccctcaccgccacggtactgtcttacagcctcagactcccctacgactccgcctcagtcgtcgtctctgccggccttcgctcaatctcggtcggtcggccggcttccgccgctgctgccgtcatcctggccggcgctcttgctgcactctagcagcttcagcgtccgtccgtccgtgcctcgcctcgctcctgtcattctcacccgcccgcttgtcgactcgaaacgaccatgaatggcctcatctcaatgcgagcgaggaaagagacgatgaagggcaggtggcgtcgaaggatcggatggatcttgggtagtacccaagcggcgcacaatcgggcgttcgtatcagagggacgaggtggggtaaggccgtacgcagcaaaaaggcagcagccagccaggtggacgaacgaacggggcgacgatgagcaggtggcaacttcagcgcgaggtgaagatctggtgcgagccgctgttgccgaacatctctacgaggggcggacacagagagagacagagagagatcgagagagagagatcgaacacgctgggtcagtgacgcgctcgaggccactagcgcgatgtagaaagagccgcgcaccggcaatcttaaacgacttgcccggcttcttcttgaggctctcctcccagttcttgcgctggtgcggcgtcatgttcgtgtagtcgacctcgcccttcgagaaaggcttcggcaggtcagcggtcggtgggttggcggcgaccgacgagcttgaggtgtcggtcgcggcgggctggtgggtcgtaggcgaggtcattgagatggaggtggagtggtggtgtgaagggaagcgagagactattccgccgaaccgagcctttgaacaggctcgcaggtcaggtaggagccaaggcattcaccgccgcatgcgccgcttccgacgctcctgagcttggctcgtgcggatgtgacccggtccctcgacggcgcggtggggaccgttagccgggcggcgagagctcgaccgtcgcgattggtcgcagcacacgcagggcagggcgtggcatgcacgactgatgtcagcttgatagcggtcgacgtcaggcggcaagtactgagaggagctcgagggctgccgaaatgaggttggaggaggagcgacgacgcgtgcttcgacgcgtcgacctcacctccagccatcacctctaccccgctgccctcccctcttactgagcagccatggcccgcgccatccgaaagaggcaggtcgtcgagtcggaagacgacgaaggcgacgactcgcagtccgagtcgggagaggaggaggaagagtcggaggaggatgacgagcgaccgcgcaagaagggccgagcgtcgacgtcgacgacttactcgcgcaagggcgcggcctccaagggcggcagaggcaaggcgccagcgccgggcaagcagatgcccgcaaagggctcggcgggcgggaagggcaagcgccgggcggccgtttcggacgacgagggcgacgaggtactcgaggtcgaggaggctggcgaggaggaggacgatgacggcgacggcgacgagggcggcgctggcggccaggcaggcaagcaggcgaaggacaaggccggaccggtacgttcttccctgctctatgctggctgagagctgcacagcggggtgccccgagagcctcgcaggctgacccgacctcctctttcgatgatgctgctgctgcggtccatgccggtgcccttcgcgttgtccgagcagaacgtcagccgctacgcccagcaggtcgtccggctcgcactctttgctgaggcctcgcaagggatgctcaagcgcgaagacattaacaagaagagtgcggtcgctcttcgctcgctcgctcgacttgaggcacgtgctgacttccgccctgaatggtcgctcgcagtcctcggcaaagacacgcgagccttcgtcgacgtgctcgccctcgcccagcggacgctccggaagacgtttgcgcttgagctcgtcgaggcccggccgaaaggcaagggccttggcggggccgacgacgtcgcggccgaggcggacaagctgcgctcgcaggcggcaggcggatcgcggaaagcgccggcaaagaagggcggggcgaagaagaaggggaagggaggaaagaagcgtcgaaggggcgaggatgagagcgagagcgaggatgaggaggaggaggaggaggacgacgacgacgacgacgacggcggtgctgccaatggccgcgtttcgaaccgcaagaagggtacgtctcgctcgaggcagatgattctcgtcctctactcgactgaccggcttgactcgcagcgaccggcccagcccgggcctacattctccgctcgctcctcccgcgcgacctcgtccagtcgatcgccgtcccctcacccgcccaagatcctggaacagcctttgcgcacgatgccgtcccctcgggcccaatccttgacttcgacaaggatggcgggatggcactcatgggcgtgctctacgtcgtgctcgcgctgatcctcgtcacaggccggagactgccggacggtcagtccctcgccatcccttcccttcccttgcggaccccgctcagcgctgaccgcctcccctcaccttcccgccccgaagaccacttaaatgcctacctgaagaagctcgacctccatccgacgacccggcttccgacgagtcagacgaccgcggccggccagccgctgacggtcgacggcttcctcgcggcgtgcgtgcgacatgcgtacctcgagcgggcgaaggctgccaagggcgtgtttggcgcgtcgcaggctgcttcggccggccggggcgggggagggagcggacgctctcagtcgcccccccccctctaaggcaggttacctataccatctgtcgtcagagtctcgccagatcattcgagaacgcagaatcttcccccccccccttgggcgccgagctgtgcgcctttttgcgaagcgcgtgagcgactacagcatcttgccgacgccaaataccttgaccaggaccttcgtctgccagctgaccttgcgttcgggcgacacccacgtcgcctcgccgacgcgatggccctcggcatacttgcgcagattggcgacctcattggccatcgaccgccggagctcgggcgaggttgtcgttaggaagaaggacgtctcgtggtcgagtgtcgctgaccgggtcgacaaattcgacgagccgatgagcgtgaggagcgggggttgccttgctgagggtgagagccagacgcctagagggaccgcgctgtgtcagcaatgggccaatgaagcccgctcgaggctcgccgagcaacagaaaagcctcacccttggcgtggtacgtccatccctcgcgctcccactcagtgagctcgacgccgtgtccgatcttcctcttttccgctgctgctgctgccgctgtggccgattggctcgtcccttgaccctggcccttcggtgccccctcctcggcaggtacaggagtcacagccgtcggcatcggcgccggcaagggcggcgcggccggtggcggctcggtccagccgcggccgacgcgctggacctcacgctcaaattcgctctcgagcatcgtgtagccctcggggatcaggcccgaaatgcccttcgatccatgaaagccgttcgactacgagaggagggaagcacaaggagtcagatgaccagttgggacgcggagagaggttagagggcctgaaacagaccttcggcgctgcggcgatgatgcgcacgtcggccttgctcttgatgacagcctttttgtaagggccgtagagcgaaaagtagccgctcgtcaagtcgacgagcggtcgatcccgtgtctcctcctcatcgtgccggcctctcgcttgctcttcggcaagcccctcgaccgccttccagacggcagccatcccgcgctcctcttcagtgatgccgagcacgccagcctggaggaccggccagacgctcgtgtcggcgtcgacgcggcggccctcccagttgcgcgtccggcgcgcccacgaatgctggaaggccgtgagcgtcgcctgggcgtgctcgtgaaacccccgggggtcgatcgtcgtgttcggccagtggagcacccacggctgggcttcgggcgtctttgctcgtcggagcttcgacgaccagagcgagaaaaagttggagggcgctgagtggggcgcagatgacgtcgggaggaggatgtacgagtaggcggtgtaaagccgcaggagattggcgaggtaagttgtcagatggagcgaattgcgaaagtgaaagtagcggtcctggcgagtggaaaagtagtctttggagaggttggcgctgaggacccggtcgagactagtcagtcgtcgcgccaagcttatacgcgacgaatgatcgcgatagacgcacccagagatgatgacctcctcgtcgccgccatagatcttgctgtgccaggtaccatacccttcgtcccatcgacgaggcacgacgagctccttcaggcccgagagctttgggctccgatagaaccaggcctcgacccggccggggaagtcgcggacgagcgggtaaaggatcgacgcggttgagggcgtcgggtagggctcgcgtgacgagcggtggtagtcaaccaagagcgtcagcttgagatttggctttgacgcgagcgacgtgcgcagggctgagatctgaagtgggcagttgcaagagagccaaagggtttaggtcggctgcggagagcgcagatggcgctgctgcgggaacggcacgcacgagctcgtcctgctcgacgccgatgtagagcgtgctgatgacgagtcgccgcttcgcattcttgatcaagctctgcaagaggccggagaagaaggggtcagcgcttcggcctcgcggacgagacgcatgcggcagttggccgctcgcgtgcggtcactcaccagcagcgcctggtagaactcctttggctcgtcgaggatgcggacctcgtcgccgcggacggggaagcgtggcgagccggttgcgagctgctctgtcagcttacggattgcctctggctgggcatgaccggcgggcgaggaggaggacgacgacgacgccgccggtgctggcgatgtgtgcgaggtctggagcgcgcgacgcgcagagacgacggccaagggagcgcgccgggccgacgaggacgacgcgcagaggacgagccctcgaggcaggaccgtccggaccgggacgacgagggccatccagctacgacgccgaccgagctgataagagagagagagtagaggagggcggcgagagcgaggcagctagctggctggcagatcggtgtcgacggccactggaagagtgccttcctctcgcgcgcgagtctttgcgcctgcccggccgacagccatctctgccgaccctctcgactgcctcacacgacccacctcttcccaaaaccgccttaccaacagctttaagatgatcggcgaaggtatcgtctctggcgcttcatgctggtcttgcctcgaggctgacccttggccgtcgtcgctcttgccgcctgccctccctccaggatggctcttcctcctcggcgtgctgctcgcggccgtccttctcttcacgatggtcttcttcgtacgtccttgaagcacgagcctgtgagcgagccgctgctaatatggacgctcattctgctgccgtcgcagatcatcatgttctctggttcgtctctgtcagagtcggcgccggccgccacacctcgagctcgctgacgaggtcgcctcccgctgccggctgacgctctgcctcgctgtcctcctccgcctgatctacagatctcgagtgcgactatgtcaacccgatcgacctctcgaacaagctcaaccaggttcggcctcagacctgccgccagacgaggtggcaagctcgtagagtggacgccagtgcccgtgctgacccgtgcctcgctgcccgcagtttgttctgcccgagatgattgcccacgccttcctcacggtcatgttcctcttctcgggccaatggattgcgctcctgctcaacgcgccgctcgttgcgttcaacgtcaacaagtgcgtcccttcgtctctcggtcgaccgcgcgcgcacgtttccatccagatcccgttcgacatgtgctgactctggcgaacgactcgctccctcgtaggatcgtcaacaagcagcagtcgtttgatgccacggagatcttccgtactgtccgtccaattctcccgcctagaacgcatggcgcgcgagattcgctcgccgtatcagccgagtcttgtactgactgtgacccctctcgcgttcgccgctgcagctgccgggccacaagaaggagtgcttcatcaagctcggcttctacctgctctctttgtatgtctgacttgatgcacttatgcggcgctccatctgacgtcaccgcccggtcgtacctgtcccctccctctcagcttctactacctctaccgcatgatcctcgcgctcatctcgggtacgtcctgctctgcccgctagctgctgtcgctaggatgccgctgaccagctcttcgcttgggtctcaatagacgagtaaagcggcaaccttccggcacgacgatgacggcaagcgacctgatcggcaggtcttctagacgggcagcgacggacgaagtcgctggtgcgtgtgcgcgcggatgaggaggcggtggcgcacgagagaagggaaggacggcggaggacagagaagaagcaacacacgaccccgaaccagttctgcgatcacgctatgactttctctactcaccctggccaccgatgctgcgccggtcaaccgatgcgagtcgagtggcgcatgcaagagtcgtggagtgataggtgggaacaagaggaggaggggctacagcgaggcaggccggcagaaccgaggtcattaacgcctggtctttgagttgcgctggatctcgaccatcttcttgccgagattgccgacctcctgcaggacgggaacgaggggcgcagttgaaggggcaaggaagccagtcgtcagcgcgagctccgcagccgcgacaagtgcaagggtatggacggaccgcctccgacaggccgagctcggcgatcgtcttcttcatctccatcaacaggttgcggaagggctcttcgaggaggagcttgccaaactgctcgatcgtcggtgggctgtcggagtcgtgtcctgcagggaggagagggtgaggatcagctcaggtctcctcccccacgctaccgccgccagcttccgtaggaggtcacaaggccttctcgcgctagggtgtccgggagaagacgagagccagcctgacctttcgactcgaggtaggcggagaagcgtttaaagacgtcctgtgccgcctcgttcgtggcgagccgacgcagcccctcactctgctccacctcctcgactgccgaccggacctctggcggcgtcggctcgggaaacgcctcccggagcgactcgacatcatccggtggcggcggcgtgcgcgatgacggaggcacctcaacggcgtacgaccgtcgagccaggagaaggggctgtggcaggcgaagcgcaggccgggctgacgagctcgatgggccggcggacgaggtggcgagacggacgacagagctcggccgggaggcacggcctgccagagatccaaggagagagcgggcgaacgacatgagcttcgtaaggtgtcgagatgaaaggtggtgtcggggaggagatcgtcgcagggtcggggaggcgaagtgaaggtcgctggtcttggtcgtcgatggtcgcgacgcgcgtgcctcacgaccgagatctccggtgagtagagggcaagagatggcatacagagcagatgagagtatttatacagtgagctgcagagcagggcagagcagggcagagcagagcagagcagaggggcaggctgggacggccgacgccacgtcatcgagccgacgtgctgatcagagcttcgacttaaccttgtccccaagtgcggcctcagcattgcgagccgtgtcgacgacctcgtccttgacctcctcggccttctcgaccgcgtcgttgacggtcgacttggcctccatgccgatttggccgaagcgcataatgtcggcatcggagatgttgtgctcagcagcgagcgaccgcatctcgccaaagatcgcccggaattcgctgtcggcgaccagaccgagcatcgcgagcttcccgggagggtttgcgatcccatagcctggaaaagtcgagaagatcgaaaggtcagttcagggtcgacgacggagcgggggggggggagacgcacccttagcctcaagcaggtccttgagcttcttagtcgtctcgacgaccctcaagtccgacgcaaagtccttcagcgtcttgctcccttggacaacctcgtcaatcttctccttgattccggccgaggccgcctcgctggggtcggtggcgtaggagcgacggaggcctccggtcgactgcaaagcggtgcgcggggcggccgtgaagacggggacgacagaggcacgacgagcgatgaggcgaggcgcctgagagtagaggatcgtgcgggcgagcatggttgttgtgatgtgagtgagagaattggtgagacggcgatggtgatggttgaggagggcaagaagggctgaccgggcgtcggctcccgaatcggccgccgctgccgggccgccggcaaaggacgcgtcacgacccgcgggtgtacttttggacggcggcacttgctgggaagtctcgacagggtctgctggcctgacaacgctcccatgtctggccgagggcagtctcgcatgctcggatcatacgggtagacaaggggggctgcaggacgtcatgcgttgcgtccctccgatgcccgctgcgccacctccgtcacagcaggacgcgacgcatcctgtcgcggtcgacgcggcctcgccaccaggtcagcttcgtgctcgtcttttctccttccggcgcagtttcggcgccggtgtcttcgtcctcgccgagatcccagaagcagctccagcagccgacccagccgccgccctcgttgctgccggcgagtactgttgggcccttccacggctcgccgcagacaacacagaagccccaccgggtcggatggtccggcggcgcacttggctttggcggtggcgggatgggcggatgcgacgaaggagggagggcgccggcgaccgagggcgcgaaggccggcagcgcgtggtagaactcgtagagcttgagcgagaggaggagtgtcggcagaagcgaagggaggacgatcgggagtgacggcatgcgtcgtgtgatcggcgaaaggagtgttggtcgggctggcaaggggtcgcgctgttgaaaagccgcgcagcatcagtctctgaaggcaggaagcgcgtgtcgctcgagtggcccaatggtacgcacaatgtcggccgcgtcgactcgatcgacgacccaggctccgatgagccccgtcggcgtccagaagcgggtccgctcgaaaagatagcgcacggaccatccgagctgagcgatcgccagcgcagtcgttaaggacggatagataagcaggaacaggtagtcgaccagccgccgaaggcgttgtcggcgggtcggctggggctgaggcgtgtcatcttccgcgtcaggagcctcttcggcattgagcctgacctcggctcttcgtgtcagaaacaggtcgtgaagcttaaggccaagatacgggaggacgacctgggacagagtaagggtgtcagagcgcagggcgagcgcgagggggccttgagctcgagggcgtacttacgagctcgatgagcgagagccagatctgccgtttcgtcaatcttgatctcagtcggctctcgagcccgcggccttgtgactctacaaaggcgtcgcgacgcgtcatctcgatccggcgcgcgcgccggcgctttaagccgtagaactgctcggagaagctggcatctagaagggggagaaccgtcagaactttcgcctgacagagtcgagtgcaaggttctacgctctggactgaccatgcttcaggaggcaccatcgctcgacgagcaagaggagagccgcccagacctcctcgtgccgctgcgcgagcgggatcaggtagcgcggataatggttggcgcagagcgtgagcgaataggtgaaagccggttggagcagctgccgaagagatgactgagcgaggagctcgaagatggacggcagagtcgaggtcgaggcgaggagggagggatccattttgaaggctggaacggctgggcggcggcgagcggtagccggagcagggagcgcgagctgagcagcgacgaacgaggccgagctctatgccggtcgacccgacacgtgttcgagattcgaagaggctacgctccttgacaacaggcgtgggagacgaagctgggtgagcaacaggtgcgacgaggtcggcctccaggcaccggctaaccggcgaggcgcgtcgccggcggctcaggtcgtcgcacgaggtgagacttacagacgaatacaacgaagcttcgcccgtcagaacagtatggactggagctcctaccgacagccgtcgagcgtgatctagcacgcgagtgttggcgggtgctgagccaagcgagtcgcctgagtggactcggaggcctgcgcgcgcgtctcgagcaagcggcggtactgcaacagccgtccgacgcaaagagcttctccttctggccgaaactggagcgaggtgagagctgcttgctgccggtccgccagagatagttgtctggcttgcgaagaagagagccggcgacggaggcgagagcgaaagggacggcgtcggaggggccggcggcgagagccatctcggcggcgagctggcctatgcccgaccaccttagcgtcacacacgccctcccgcgaagcggagcgtgacctccgcgcggcctgaacgtcccggcccaaatgcccctcgtctttagccaacgataagatggccaccgagcaacatgagagcaagagagtggtaccgttagaaagcttaggatgtcagcttcatcctgactcagttttgatgcgatctagacagagggagggcgaaggtgcgctccttttgatcgtgggccagacggttgaagccaggcgcgtctcgagagctcgctccgtcgacctcgaccatcatctcgccccctgaacgcctcaaactcgtcatgagagctcgcaagaaagacaggaaggaagcccttgacttcagctctctgatggtgaaggtcgtattacatcatgtggctcggtggccactttatatgtcgctgaatctggcgcaggcgtttgagccgggacgttcacgcgtagaaacgcaagcaggcgcacgcccctgcttcgcaggcggcgggtgttacgctaacgaccacctgcaacagccatctcgacctgccccgacccggccctccccctccctctcgtgctctactcctgcacttgatcagctgcgatgatcctcctcgaggtgcgttccgcttgctggtcattgtttaagctgaccttggatggcagacgggcgacgaagcgcgtggacgcggactgacggcctccctccctgcttgcgatggcccctccagccccagaatgttatcctcgccaacgtcctgacggagaagtttgtcaagtgcgtaccctctgctgtcagaccggacgtcgacctagagacttagcgaacgagctcaggcctttggacgcccctgctgccgccgcattgcgctcgcctcggcgctgacgctcgctgcttgtcttgctcgggctcgcctcgccatcccttgcctgcccctcgctcttcaggccgagttcgatcgacctctcgttcgtcgactatgattcgacccgatttcacatgtcgacgccgacgtcgaagcgcatcatccagctttcgatgtcgatccgctgctggcccgacctcgtccgctacggcgtcaacgagacgatgcagcgcgagttcggcgactggctttcgcccgacggcgtcgaggagggcttcaatgtgacgctcgtgctcgacttcgagaagatccccgaggagggtcgtgcgtctctcccttctcttggcctgcggacgctggccttgcgctgggtcgctgacgagctgctgcctcgcgcccgcccacgctgcgcacagaggcccggatcgacctcatctcaaagctctcgcacatcaagccgctcgcgctctcgacgcccttcctgaaggcctttgcgacccagccaacgctgccgtcaccagcagacggcgagagcgagcagtcgggcgagctgatggaggtccactatcgcgaggacgaggccatctacatccaggccgcgcacgaccgcatcaccgtcgtctttagcacgcgctttggcgaggaggtcgaccgcgtctttggcaaggtctttctccaggagttcgtcgacgcccggcggctgccggggatccagaatgcgccgcaggtcaggtactcgaaccgcgacccgccgctcgagatccggcacctgaccgatctcaagcggactgaggagatgggatacgtgacattcggtgcgtcgactttcgtctgatctcgctgctcgtctcggccgctccgactgacgctcgttcatcgccgccggacagtcctcttcccccggcactttacgcccatcaccgcgcccgcgacggcgatccagctccagctgttccgcgactacctccactaccacatcaagtgctccaaggcgtacatgcattcgcgcatgcgcgcacgggtcaccgaattcctcaaggtcctgaatcgggctcgggtcgagaaggacacgtcgggcgcgagcgagcgcaagaccgtcaggtgcgtgccagtctcacttcgcctagacaggcggcgacgtctattgtcgattgctcgacagacgctgacccgcaaccgctttctctgctggtcatcgctcagcggacggaccttccgcacgcggtagagctcctccatctctcgtacccgcctccgcttgtttctggatctgctctctcatgcccctgacacgtcactcgtgcgacggccactcagccggtgcacgccaagcggacgagattttcgggcatgatatctggcagagctacaaaggtcttttggcagaagggggtcaaggccggacattacggcggaacagcaagacggcactaaataaggttcagaggaaggcgacgcgtgacagacgacgcgtagggggcaaaatatggtaacaggtgaagcaaagcgacaagtggagcaggtcggcaagatcagaaagcgaaaaggggggttgtgggaaagtgctcggacgacacagcgtgtgcgccggagccaagcaagctagagcgggctcaagaccgtcatcagaggtcgcccgagaaggtgaggaagccgccgctgtcggtcgcgttttgggacgtcatgacgagatcggccccgtcggcgtactcgttggggccgaggaagccgccgtcgctgagagcgagtgaagagggcggtcgtcagtgcacaagcctgcgtctggcagacagcagacgagatgagacgtactagcctctggccgaacccgccggtccgacaaagcggaggaagctcgtacccttaatgccagcccgagcaggcaggccgacctggtagacccaggtctgcaggtactgcccgctgtcgtcggagatggtgcacggctggaggtgcggcgtctcgccgttgtacggcgactcgactgtgaggcagagagcctcgtcgtagccggccggcttgaacgtgacgtgaccgtaccacaggttgttgatgctcgtcctgcaagggcaacgcgagtggttcatcacaggtcagtcaccgaggacggccgggccgaggagacccgagaagagccagggaggtatttaggacgtactgcttgatgatggtcgagttgcagacctggaacgtccactgaccctgggcctcgccggcgagcccgctcgcagacggcgcccaggtggcgttgccatcggcggcgatgccgacagggatgagcgtcgcgtcgataacgccgtcggcccagaagaggccgtctgcggtatagctcgcgtcgagcgggctgcactcgattgtctcgacgatgcgaggctcgactggagcggccgaggcgaggagcgagccgagcgagagggcggcgagcgtgagggaagtggcaagcatggccgaacaaggtcggaaagttgggtggtcggtggagatgggagaagcggttgaagaggagagcgtcgaaggctggtcccttttgaaaggcggtcgtttgtgtggtctgtgctagctgggcccgaatgactgtgatggggcagaggagcgagcgaggtcggggtcgggggggggcgaagaaggaaggcgcgcctccgccccgacagtttgccagcttctcggcctggcggcattgcctcggccgtccttgccacatcggcccctctcgctccgttctccttcagagaccctcagtcgctgatagcttccacctcggaccgtcgccctatctgcccgctcgcagcatggctggctgttcaaggacattggggctcgagctcggcgaggaggatgctgctgcgcggcccggccgccggtcccacacccccctgctgcgtcgacgcccatcgccagagacacgatcagcggcggcgctttcgccgccccgtagagcgtgctgatcgccctcgtacgacctgcaaggctggcctcggtcgtcccttacgctcatccatcgctctgccgtcctcgcttacggtcgctcagctctgacggcagcaagcctggcgcgggcatcgacgacgccaggcttgacttcgggccgcggcgagctaaacagccccttttccaggcccgcaggacgacgcaagcccctcctgcgaacgaccgagagcagttcagcccccgaggcaagctgtctgtcggcgtccgccgtccagcatgcccgcctgcgcctcctcttcgagttcgccatgtcgaggccgaaaacgctggtcgtcgaccccagcctgaaacgtcgctcatcgccgacggcgacggcgaatcaaagctggtgagcggcgcgtgggcggcccgaagaagctgcccggcatcggcatggtgggtggcctgactcgcctccaacgtcgactccccccaactctcactctcctcttccctaactcgcctgatggacgtcaagaggctgtctcccgacagtggagacgtcgaagcgacggcgccggcccctgcgaccgacgccgacgtccgcgccgccgccgctgctgcgaccgctggcgaccgccctgtgccaaagtccaaccttcggatcgtctttccgaggtgcgtcttgggtcgtcgccctccttgctgactctcactaggaactgactgcaggactctcgcttgctgctggcggcgttcagtctgatgctcgccatgttccttgccgccttggaccaaacgagtgcgtgcgcgctcttctcgtcgcgtcgtcggacaaggccggcaggtcacgctctgggatgattgatcgcgaccctcccatccgaaccagtcgtctccactgctctgcccaccatcgcgtcggagctcaatggtacgcctgccgtgctccaactcagcttgagggcgtgtcgctgacggtctcgctcctgccagcctcacccagccagtactcatgggttggcacgagctacctgctcctaacgacgaccctcacaccctgctacggccgcctatcggacctccttggtagaaagtgcgttccgataggctccaggccggcgcgcggatcttctcgctgacccctgttgccctcctccacagagccatcctgtacttctcgtgtgtccgacctgctcgacttgacgccaggcgctatgaatccgcagctgatccttcttgctcatcgcacgtcatagcatcgccatgttcaccgtcgcctcggcagtgagtcctgatcaccgctgttgatcctctcctactgcagctcggctgacgctcgtccttgctctacttcttagttctgcggtgccgctcagaacatcgaatggctgatcgcggctcgggcgttccagggcgtcggcggaggtggcatcatgagcatggtgaccgtctgcatcggcgacgtcgtcccgtttggcgagcgaggcagtgagtgcaggccgtccgcggctgatgatggcgcgaatgctgaccttcctggtctatcctctttagaataccagggctacgtcggcggcatctggggcgtcgcctcagtcctcgggtacgcgccgtcttacttcgcgtctcgaagtctcggccgttgctgatcgccgcctctgagccgtctcagcccgatcctcggcggtctcctcactgaccgcgcttcctggcggtggtgcttcttcatgtgagcctttttattcaagctcactcgcagtcgattcctactctgacaatcgcctctgccctcctagcaatctcccgacctgcgtcattgcgttcatcctcctctggttcacgcttcgcatgccagaccacccacgcgtgccctggtcgcagtttaagcacgacttcgactggaccggcctggctctactcgtcatttcgctcggctgcctcgtcgtcggcttcgagcacgcgaccgactctggctgtgagcctgactcgatgctcgtccgcagtccgttctccgtgctgacggccgtcgacctccagtcaaggatcccgtcacgattgccctcgtcgttgtcggcggaatcttcatctgcggctctggcatctacttctgcaagacgcccaagcgcggcatcatccccgctcgcatcctccggacgcggacgaccggagctctcatgctcgtttcctatctgcaggcgttttgcttcctctcgagcactttcttcctgcccaactggtggcagtcggtcaaaggcgtgagacccgtagaattccctccttgcagcattcaccgactgacgtcacctgatgcggcgcacgcaggtcaacgcgaccatgtcgggcgtctacatgctcagcttctccctcatggtctcggccgcatcgagtgcgtgtcgctcccttcctgcacactctcgcttttgctgaccaagtcgcctgtagtgccgaccggctggtacatctcaaagtacggcaacgtcagctgggtcattcgcatcggctactcggtcggagctatcggtgcggattcgacgaggcgacggacccgttagcaggcgcttcgctgacaccttagaggtcgctcctgcaggcttcggactcatgaacctcatgaacgccaagtcgtcccttgccatcaacgagatcatgcctatgcttagcgcattggggatcggaatggtgcgctcttctcatcgtcttctgttaaagctcacactaaagctaatcgtcgctgcccgactccacagtctcttcagccgccgctcatcatgctccaggcagcgatgccgctgagagagatggctgcctcgacctcggcctggatgttgtgccgcgcactcggctcgacgacgtccatctcgatcgtcggtagcatcctcgcgagccggcaggaccatctgctgcgaggcatccctgggtacgaatttgtcggcgtgccgagcactcggagcgactacgaggctttgcatcgggtcgagccgccagaggtccgggcagaggtgctcagcgccctcgccgagagcttcacggtgcgtgcccctacgcctatactcgaaaccgtcacatcactctgacgccgtcgcgtggtcgccgcctctctctcctggcagaccattttcaagatctacaccgtcttcatgggcgtctgtctacttctgacagccatcctcaagccctacagcttgcaggagcagtacatagccaaggaggatcgcgagccggcgtcccccctgcccgaggccccactgaaggtcaacgacctcaagcaggaggaggaggagattacgccggcgacaccccgaagcgacgccaccctggccgccgggccggagggcgacgaaaagaaaacgttcgcatagatagaggcggtttccccccgcccacctgtacaaccccggcctcaggccgccctgcgcagattacatgttgtctcccttgcttgtgctcgagcaggtcgagctcaagccggcgttgctggtactccagtgacggcgtcggtcatgatctcctgtaacgcttgcggcagctgcggggcgatcgagagcgctgctgcctggcccctaggcgacagttttcgccaggttctggcgagaccgagaacgaggtcagcatgatgagcaggccagtgattgacaaggatgaggtcgacgtacttgcgcaggatatcgacccacttctcacgctcgaagccctcgccgccctggattttggtcacgaagccctcgagctccttctcgagaaagaccatgacggcagcgtcctcgagggcctgcgtctcttcttcgacccgcgcccgcttcgccgggtctgcggagtttttgaggttgaggttatctttggcgacccagcgcctgactgcgtcggcctcgtcggcgtcgacgccggcggccacgaggagcgcatgcgccaggtctgactggatcgtgtacaggtcgcgtcctgcgggcggttgaaaagcgtcaggcccgaagctctgggtcaaatacaaaggaagagcacgcactccaccgcagatagccagctttgccctcggggtacgtcgtccgaggcgtcgagaagcggtcgaggtgttggcagcgcgcggcgagcagcagggcctcagacggtgcgtcgtgcagctttttgaccctgtgagtcgggtccgagcgaggcgtcagtctctaagaggaacagatccacgagcgcatatctgacgcaccaggcctccattccgtcagcgtaggcgagctcgagctgaggaggagtacgggagagctcaggtccgtgccttatcggccctgatgggcatgctggcgcctgacgcacctgagccgggtcgcgccgatgtacttcgtcgacggacgatcgggcctgtgcataagcctcaggtgtagacatcgtgagctgcaagaggtgttgtccggcgattatggcacaaagcggcaggcttgaaggggtgagggctgaaggcgagggagcgctgcgccttctcgcttcaccctgacgtcgacctcgtccgccctcttcgacgctggttgacagctctgctcgcttctgaccagtccctgcgacgtcgtgtgaagagcagaagggcgggctgactttccgtcatcacaaggcttactccggctctgcgtccgcactccgtgcggagatctctatgtcaactgacggccggcggcttaccctcgatagcccaccctccgcctctccgatgcccggcgtcttgcgctcaggaccgctccaaacaatcatgcctgaacgaggtttcctcgtgctcatcgccgctctacccttgacgctctttcttgggagccgctcgagcggctggatgcttgatccctcgaccccaaccgcctcggcgtctcgggcagacattgccctgctacctgccgagcagtccgggacacgctcatcgcagcaggcctgagtttccccgttcgatgccgtcgagaaaagtcagctgctgctggcagaggggaaggcctgccgagggttagagctgaagtcagcgctgtcgccttctaattctgatcctcttcatctgcaggctagtcgccgacttttgttcagcagcaacaacgcttgtgcttctggcactctgatatttcatgcacgagctggtagtgcccacgagatcgaactggaggtgtctccgcgcggcgcaggccgggagtgcccttggcagcacagttagccaggtagcgctgctggtgaaaaagtcaacaacgacagattggttagaaagacgctgggacagggtgcgagaggcgactctccatgactgtcgctcagcgtcttgcgggtcagccacgtcgccgcggaggcacgagcaggcgcgtcgttccggtgcgttgacgcgtctctcgctcacctccagctaccatccgacgtcaccggcctgcttcacctctctctttcggcaagcacccaagatcctgcacgtcatggagacgatcacagccgccctgcagtcgatggctcccgcccggccgctcacggtgcacttgctcgcgtcagagtcacggcgcacccaggccctcttcgagcatgccgtcaatcacccgaagggaacgaccgtccaagacgtcctcgtgctgctctacatccacctcgagccggacgaccttccgaatccgacgtctctaccgcccaccgtcaacgagactgacggacaggcgcccacgtcggagagcgacggcgaggcgagctcgacattggctcaggagcttcttcagccggtgctgctcgtagctctgcaggcccaggtctacacgttgccagcgacgtctacgaccgtcatctacattgccaaggccgactcgtcgtcctaccctctgccggcggtcctcggtcgcaagccgtacgttcggacgctcatctcggccttcctcgcccattacctcgcgccggcgacgcgtccgacggctcggacgtttgttcagctgtttgcccggagccaggcccagtacctctttcccgactcgggcgacaacgctggcaagcggattctcaccggcgagaagctctgccgctggtggaaagctgccctggaggaggcggtcgcgcgcagccgagccggcgtcggcgctcaggacgacgaccttcggctgagctatgtcctgcctggcatggccaagtacgaggcttcgctcatggtcggaccaacgactgaggcctatccgtggtcgtacggcatgcgcgacctgccaagcatgttccccccctcgtcgctccccgcttcggctcccgcagcagacggcccgtcgtcggaagagcccgcgcgcgacgtgtcgctcggcgagatcatcccgacctttgaggacgacccacgcacgaggttcctaacagaccttgctctccctgccggtgcggcaccaacgcctctgtcggcctccttaagcggaggcatctctaagccctgcctcgcagccgacgcagaggacgacgacggcgtgagcggctcaagtcaagagccttcctcggtcaaggctcggcacacggccttaagagcctcggcgtcaatggcccggcgagagaaggcgagcgcaagactcgtgaacacgaccgaggaggccttttgggagctcctcgcgttccgtcaagagtgcagcctcggccagacggtcggctacttctcgctttactcggccacaccctcggcgccagtcaccacagccgtttcgaccgagctggcttcgataccctcggctctcctgtccgcatcgaccctggaacgcaaggcggccggcgtcctgccgaagcacttttggctgcgcgtcatcgccacgctcctcaaccagtcgttcgccacgccgccgctcatcgtccgcggcagccggaccgtttgggacctcacgcagacgctattggacgacctcggcatgctcgctgctgttgaaggacgcatcgaggcgattgcgcagccgacgccgccagagacggccggcgacaagcgcaaggctggcgaggacgccggagcctcgagcgagcagcctgcgttaaaaaagctgatagccgtgcgaaagaagaagaaggctgtcgaataagcatggcgatggtcgtgagtgcggacggaattagtcgctgtcgtcaaagccagccatctgctggaggccggccgacggcgtcgcttcgcccagggcgaggtcgatctccattggctgtgggccgaacgagttgtcctcatcgaggccatgcgagccgaggactggcagtgggttgtcctcaaagatgtcgccatagtcaggctgggacaggcgcggcttcgggacacgcgacgatcggcgagagcctgcccgaagcgacgacgggtcctcgaggtcggacgagtcgttgtcgtcgtcgcccgcctcccagtggtcgctgtgttcgcttgccgagtgctgggcctcgggctcggccgcgtactcgtcggcgtccatcgcggcggcctcgcggtcgggttcctcgcccttgccaccacgtccccggccccgacctcggccgcctccagtgctcgccccgcggccatcgcgactgcctggccctccgccacggcctcggccccgaccccggcctcgaccccgggtgggcgcattgctcagagccgcactgaagccctctggcatcgacagccgctttttggatcccgtcgaccgctggaggggcccgcgcggtcctgtccgcccgcgcacttcaaacgatctcgactctgggttgtcctgtgctgcaggctgctgcggcgtgaagagaagcatgtgctcggacgcgagcagagggatctggtaggcggctattgacagcaagcgtggtgaggattgtcagctcagagcgccggtcgggtcgaaagaggagagcatgacgcaccccactgatcctcctcggtctccgttcggcccttgcgacgcggcttcttcatccgcaggatcatctcgctctcgaccgactccatcgcctggcccttgaaaattgtgttgttgaccttgaggtagggcgtcggcgagttgaggccctgcaggaggaatccggccgcgcggtcagcatcaaggcgctgagctcgagggcgagcttcgtgcttcggcagacgtacgatgagcgaccaggtgtgccgctgaccggctgctttcttctgcgcggcgtgagccgccgtcgaagggcctccctcgccgccgccgttggctgtcgacccggaggggcctgaagccagtggagctgccagcacggttgctcggggcagcttggagccagccggcggcggctgagcaagcagcgccgtgtcgatatggcgcgagagcgacagagtcatgatctcctcctgcgaagcaagctttggggtcagtctggttgcctagctttgacttgtggcagggatggcgacgcgtcggttggagggcgagctgcggagacgaagactgacctcaatctcctcctcccactcttggtcggaggcaagcccgtcgcggtcgtctggctcagtcgtaaagtgagtgaccggcacaaagtgcggagggaggacggaggccatcgtgcgtgaaggagttcctgctgtcggcgaggtgatggtcgggcgagtcgagaaggcgagagagcgacgagccgccgcagtcaagccgcccgcatgcagccgagcgcgatacagcctcgtcaatctcgagagagctgcaagcagcgcatacaagacagccgactccctcggcagccagcaagcaggccgacgttatgatccccgcctgtggtcagtagacttgacatcatgctcctcactcttgtgcatgttccaagagaatatgttcggagcaacggcaccatcagctagaaagtcaaggccccgctggcccaatggttaaggcgcctgccttctattttaaaaggctagctggagattgcgggttcgagtcccgcgtggggttaaggttaccattttgctcttctgtgagctcgagatccgaagctttcggtggagatggcggcgaccagccgcccgacgagcgtgttcaatgaacgacgcaggacgcctgggtatctctccggcagatgctggaagacagctggcctgctgcagtacagtgcagggcgggcggtgaccacgcgacaagacttccgatgcgagccgcctgcccgacgcattgagagggcgagctgacgagctctgcttcctttggcctcaaacgaccaccctcgaccgcctcgcctggtcattcgatctgtgccccttcctttcccttctagctcctccgaacgacaccacacatagcccgtccacgcaggtcagtccttagcggtatcgcagcccgtcccggctttgccgttgctgcgccgactgcttcttgatgctgacctctaaacacctacctcggttcacgccctcaagacggtcgcttcactggccatcgaaccgcctcttctctcagctcgagacctcatcggcatcagcagccctgcgcggcgcctccagttcgtcttccgccagcagcttacgcaggatgaagcgaccgctgacgatcccgctgcgcgcattcactcactcagtcgcctgaccgcgacgcctctcagcggccggctggccggcagctaggactctcagtctcagcacctacaaccaacacgtctcgctggtcatgccgaaagccaaaggctggagcgaatcatcgtccggctcgtcgcgcgacgggcagttcaagtgcaaggagtgctcgccgccgagctcgtgggacacctaccgcaagctgagctaccaccgcgagaatcagcaccggatgcagttcgactttgaagtcaacgggcagagtgcgtaccagattcagctccacctccttccggcgcagtcggaagggctgacaagggtgtcggctgctcgccctccttttctgcggcagctgtcatcgcaactcgagatgccgtcgaccacaagctcggctgcccaaggtgctccggacgctggagtgacctcaacagctttaagaagcacgtccgcgaggtctgcctgccgccggccccggcgctgaagcgcacgggcacgcgagtcgagtctcggcgtcgtccgctgccggccgactcgcacccctcgccgctctcgtcggtcacaacctcgtcgccgcccgtcacgccagacgatacggcagcagccaaccatgcaacgtctttgacactgccggacgaagccttctccagtcgtcgtccgacgtccccgctgtcgaagccgaaggggccggctcacggtcgctaccggatggagcccatcgtcgagaccatcgtcttcccgtcctccgtcatccctcctccatcgcgatcatcacgtcttcggccgaccgagaacccttcgccgcagcttcaccagccaccgctcccatcactcgagccgactccaactcttccgaccagcgcgcggactcagcgcaagcgcctcacacgcgccgtcgacggcatctgggcggcgatcgagcgcaaatccggaaaatcgttgaactcggcgcacagcgagcaggggatgcgggaggagccgagctttggaggggagcagctcgtcgaaccgtggtgggatgtccggcgctggaagggcgacgcggacgaggggtgatttgtgcgctcctccctccattaactggtgcccctaccagtcgctgaccctcctctgactccggcaggacatgcacgacgaccaatctgattatcttccagcaacgatctcatgccaatcttcacgactttgatggtgccgctcctcgagtgcagcgtctgcgcgcatgtatgcaacccccaagccgcaagcagaccgctctgccggcgcaagtccgtgccatctctgatagacggccgtgtcgtgccgtgtcgtgccgtccgtcgcgtcgagctcccggtcttgagtggaagatctgacggccggagagacgtatccgtcgaggcgggccagagacccttttggcacggctggtgacgatgaccagcgagctcgaactcgacccctcaacagcatcgccgcccaaccgacgccatctatcagcactcgctccctaccctcacctcttcagcctacatctctgatcagaccctaacatggtacgcagcttgccttgccgacaggaaggcgtaggcggccgaccgccgacgaggtcctgacgcgttccgagctgccttggcctccctcagtcggttcccttcctggcgacgcacgactcgcaatccagtcagtccttgcgtagctcagcctagtgtaacagctgctcgggacgcgccatgctgatcggatcgtctgacagagcacgaggacggcatctgggccgtcgagtggacggtcaaggaccaggtcatcagcgcctcgggtgatggcagcctgaaggtctggtgagctcccctcttcatctcgatgccttcgatcgagctcgctcggagctggagaacgtgttcttcaagcaaagctgagcttcttcaagcaaagctgagcttaaaggctgacgcttgatgccgcccatcccaggggcctcgacggcaagctcatcaacgacgctgccccgcagcacccgctcggcatcgtctcgctctccgtcgcgccctcgggccggacagcgctcgccaactcgcaggacgggacgacgatgctccacacgcttgatggctcggccccggcggcggtgcaccagtcgtttctcgagcacgttggccggcaggaaggccagaactttgcgacggccgatgacgagccgagcgtcaaccggacgacgtgggccgtctcgcttcacccggacgagaaggtctttgcggcctgcggtgccggcggcaagatcggcatccggtcggccgtcccgaccgagggcgatgagggcgaccgctacggcaagcttctacgcgagctcgagactggacgcgagaagttcggcctgacggtcaagtttgtgcgtcttttgttctcgggctgtgatgatcgtacgcaggaagaagtagctgacgctcttctgtcaacgacgcttcacagagcccagacgggcgcacggttgcgctcgcgtccgagaacggccagatctttgtctttgacgtcgagagcggcacgctgcgcaacacctactcgtcgcacaatgtcgccgtccgcgcgctgacctggagcccagacagccaggtcagtccctcacgcatacggctagtgctctgggcgggcagctgacccctgctgctccctcctcgcctctgctagttcctttactctggctcggatgacaagtcgattgtcctgcacgacgttcgctcggcgccgtcggcctcggcgctccagcacggccagaagtcgggcgtcgcgacgctgaccggccacagttcatgggtgctctcgctctcggcctcgatgtcatcaacgcactcgctcctctcgggctcggccgacaagacggtcaaggtctgggacgcgcgcgcaggcggcaagggcggcgagaagggcggctgcgtcgggacgtttggcgaggcggccgaggtctggggcgtcgcctggcggccctacgaggcgaaccaggccgaggttgccaagcgtttcgtcagcgccggcgatgagcgggctgtccggtgcgtctgcccctttgccattccaccctttgggcatttgctgaccctcatccgtgcgcttcgcgacctgcaggtggtggagggcggccggcacagagcaatgagcatgcacccttttcggcagctgtcgtgacgagaaggcaggctctttgaccataaggccagtaagctgctgggtgctttccgcactcagggtcgggaacgctaggtgcgacccgatggagagtgcagaggaggtcggcaacgaccggcggcgatcagagcgtcctcttgtccgtacggctcgaataggccctgcatatgcggtccggcccgcgtgtcagaccaagacgcattgccgagcagcgcacacccttccggaccgcaacatgtcggaccgcaacatgtgctgtccgaaaaggcgagcctgtcgtggtacaagagtcgagctgcgcggcgcacggcggcttacgtcaggcgatggcgaatcaggccgccgtgagtttcgacttacgcgctgacagccccgtctccccgtctgtcgcccctcctctcttaccaagccgaccacctttcgctcagtcagaccgatcttcctcgtagagacaactcgaagaccagccgatcgtctaaaagaacgtccaaacgccagccgtccaccgactcaacaaaccacccgcttcactccctccgacgacattctcgagctcagcagccctccacttcccctgcgccctcaacacccctaccgctcgccgctcctctcgccatggcctcgcactctgactctgaggcgtcgacctcttccgccggcgccgctcccactcctgcgccgctcttcaccgagcaacagctgctcgacatcaacgccgagctcgccggccagtctccgcaggccatcctcgcctgggctatcgataccctgcccgccggcgctctctggcagacgaccgcctttggcctgtgcgtccgccgccgtccgactggtaggtcgctgtggacctcggctgatcgactctctttctcctgctgcaggaccggccttgcctcgctcgccatgatttcagacatttcgctcgcgcgggatgagacgcacctcgtcccgctcatctttctcgacacgcttcaccactttcccgcaacgctcgagctcgcccagcgggcgtctgagcgctaccttgccgatctgcacacgttccgaccgctcggcaaggacggcaaggagctcgcgtcggccgaggcatttgaggcgcagtacggcccgcggctgtgggaaaccgaggaggacatgtacgactacctcgtcaaagtacgtcgcttgcagcagcccctattgggtgatcacggggtcagaaggcttactgtccgccttcttcaggtcgagccttcgcaccgggcctactcgttgctcggcgtccgggctgtcctgactggccggcggcgctcgcaaggcgccgagcgggcagcgctgccgatcgtcgaggtcgactcgaccggtctcatcaagatcaacccgcttatcgagtggggctttaaggacgtcaaagcgtacattgacgagcagtgcgtccgccaacgacttgccgcccctccccgttcggcgctgacctgcgcttcgccctctcctccagcgacgtgccgtacaatgcgctgctcgacgccgggtacaagtcgatcggcgactggcactcgactgcgccgccgacggccgtcaactcggccgcctgctcgggcacggcgacgcctgcgtcggacgccgacgagcgctcgggccgttgggcggccaagcagggcgcaaagaccgagtgcggcctgcacaaggactacttcaagatgaagcgccagtttgagaagcgcgtccgcgaggaggagctccgtctggccgatgaccggaaggatgggtcggagccgatcggtgcgctcgacgcgactgcaccggtcgacggaggtgtcgtcgtcgacgcccagtagccagcttcttcccttttgtagacagtgacggactagagatgcccgtgttgtactgctcggcgcctgttttgactcacgaggcaaggcgagggctgggcatgccgtgaggatgggggcgagagaggaagaggaggaagggctgcggcgggtgcctccactttgcactaattcgcactaattattcgatccgagttgcatgaatttgttttcggctgcggggaggggtgggcggctgccctgagagaccctgcccctaccgtctctcggccctgcgcccgcccaaccttccaaccccccccccccccgaaggcctgcacaaggcccattcgagctgttcccctttcgcgatgctgatccagcaacaccccgtcggcaaggctgcatgcgacgagagcagagtcgtctcgcgacactatggccccctgccctcggtgcaattgtcagcccagcgccttcggcctcgattcggacgagctggcacccttctcatgcacacacccccaactgtactcctatcgcaactccatcgcagcacgaccgtcttcttccctcacacgctctctctcacaggctggtagaggtcttttttatctgaatcgcatgcctcttgcgcacgacctgctgctgccatcgctgccgtcggccgtcgagtgggctgctgcgccggcccatctggccgctcggctcttggcgcgcatggcgctgctgccagaccccttggacgggatcagccctcgccccactctctcttgacgaccatcgacgcccgattcctccttcgagtcgagcctgctgctcatggtcaactcaaaaacagacgtgttgcttgatctccagaagggtgagtactcgagcagagcgccgctcggcttgcccgctgcgagcagggcagcaaccgtccctctaccatgaccttcagcttcatcttcatcttcaccggctgacatccgatcctccgaactctcctcgactcgaggctcggccgccgacctgcccgatctgcacgaatacggcttcctcgtcattgagggatacttagagtccaagatccagcgcggccagacggccagccaggcccggacaaagctcgacgagcttgaattggtgcgcaggcttttggtgcctcagccacttctaatcgaatcaactctgccgctgacctaccttctgccgttgactgtgcttcccttaggccgtacgcgatgcaggagtgcgttctggacgtcctgacatgaggacgttgccgctgtggctgacccgaccttggctcgccctcggccggcgcgcagctgccttccgacttcacctcgaggtcagtcagccacaggctgatgctcgctccgagatcaggatggcgcggtggtctggggtcaagctcaacaggaacgagccctgcagcctcgctgaccatcacactccattgcagcttcaatgagatccgccaactcctcacgacggctgagtctgggccgctgtggaccgaggtatcgccctatcacttccgatcacgccggtcatcctcggccaacggcggctggcggtcgcgcgccttgtcggctgcccagggcgatgagtcgccccgtcggtcgagggagggctcgaccgtcaggatcgcagagacccagacggccgtgctgacggccctcaagacaacttccaacgacgaggaagcctacaaaatcgtccatacgtatgtccagcgcaagatgctggcaggcaaggacgcgtactgggccgggtacaagaccgagctcgtcgagagagacgttaagagcgacgaccagttcccagacgtcggcccaatgtgcgagcgctcgtccgatcactgcctagtcgcaagagcttagaggctgacttctcgccgctcccacccagattcatcgccgtcaggcgggacctcaacctaccgccctcgcccatatttcgcgcggccgaacaggcgcgaacctactacctcccgccaccgacgccgtcgtacgacgtcccgccggcgggccctcgcccggcttccgagctgtcgtacgagcctgagccgccgccgccatacctcgcccggacgagatcaaccgttgaggccgacagggcccaagcgctcgatttttcgctcgtcgagaaccggcagcaggtgcaagagcaggtcgccattgcaacctcggccttgcagtgagcaggagaggcgaaagggcacattttgtattcgtcggcccggagagggtcgtcggtcctaggaaaacggttgtaatgtaacgtgcttttgtcgtgtaggcggagctagagtaagggacgacgtagaggcccggaaagtcgagggcaagaagagagaggaacgagaaaagcagcttatatgcgtgtgaaagggaaggcgagcgagagcctcagatgacatcgacgacgagagcgagtgcctcgagccacttgcgctcctcgtcgacctggacgtcaggcagaacgcgggcgacctcagccttgacggccgcgccgaccttggtctcccactcctcggccgcaccaaagccggcaagaacctgcgcatcgtactgctccttgctccagccaaagaggaggtgcggcggccggacgacggccggcttgccgtcgagcgcggcctcaagccggcggccaaacaggtggaagaggaggaccggtgggacgtcgtcgagcgcgtcgaggaactcttcggtgctctcgtccggctcgccctgctcagcgccgtccatcgcgagcttaagctcacggaggccgatgaggagcgtctcaagcccgttgggcttgccgatcgcgccgacgacgatccggagcgactggagggcctcgatcgcctcggcgagagcctcgcgcgcgagatggcctgggtcgggcgccgcgggcagaacgtaaggcacgaggccgtcgacgagccgcatgacgagctgctcgaaggcgaggacgataagagcgggcgcctctccaagtcccgtgccgcgcggtggggacgacggccgcgagggcggctgggcccggagaagcgtcgcgacgctcgtcgacgtcttggaggcgagcagtggccgaccggcagcagcagcgccctgcgcatccagcgacggcgtgctccggccagaggcagccggaagaagcggccgagtggcgcccagccgggggctcgaccggtcaaagtggcttggccgctcgacgaggtggaccatgccccgccacgtcgttgagacggcgatgccaacgacccaaccctcgcccgcctcgctgcagccgtttgcgatcttggcgagcgctcggcgggcgtggtcgatcttggaggcaaagacggcaaggcatgacggcgtcggctcgacgtggccgttaagccgcggcttgctgtgaagcagcggcttgtcgggctcggccagcgacgagagggccgccgcgagctcgcgcttgaggatggccagcagggggaggacgacgcggccgacgatcgagtcgagcttctcgacaaccggcttgagcgcgtcggcgacgaacttggggaacgcctcagcgccgacggccgggccgctggcgagcttctcgccaaaggcattgcggacctcaaacgcggcgtgagcgagcgagaggcagaacgtctggcacgggttgaacggcgagccgacctgaacggccgagacggtcgaacgaatcgtgctcggcggcgccggcgcaaagaggatcgggtgcgcgaacgtcgggtcgatgagcgccggaaggaggaccgtctcgagtcgggaggcgctggggacggaggacgcacgcgaggtggtgtctcagcgcttttacatctgtaacgattgctttgggctatgggcagggactcacaagaccgagagatgcttgaccgagacgcggaggatcgcccgcaggacgtattggtcaatcggcggcgccgggaactcgtcaaagatcgccttggccaggtcgatgcccgccccacgagcgatgcccctccggcccttgaactcgcccgcgagcacgttgccggcgagcgtccgggtgacagcctcggtgatgcggaggccgacagcctccatgttggccgaagggtcgccgttgacgttgctcggcgcggcattgccgcccttgatgcctccgccggggaggacggccgagccgccgagcttgggcgaaggagctggcgtcccgacgggcgtaggcgcgcgcgagctcccggtgagcgagagcatgccgagcgggcgcgaaagcgagcgcgagcgcttctggccgtcgccggcgctgccgtcggcgctcagcgcgggcgagggcagagcaggcggcgtcaagccgccgccgagctcggccgacttgcgaccgcggccggtgtctttcgggggcgagagcggcggcgtgagcgcgccaggttggtggtggtcgaccgtgccgtgcccggggggggcgggcgaggccgagcgcgagagcggcttgaacgacggaagcgcaaaaggggcgcggatctgcatccttgcagatgtctttgggacgaaggaagtaaggaggcgggacgggttggttgggccgagcagatgacggtgccggtcgcggggtcgcttttgcggggtttggctcggttaggaggccgggcgcgcgcgtgcgagaggagctattgccttgtggaaggacgagggggcgaggggtcgacgggagaggcgagcgacgtggttgggacgacgagcttcaacccatcaaggtgcttgcgtttgctgagcttttggaggtggtgaagggagggaggacgggccgagcgggaaagtcggtggggccggggggcgggcgtgaagaaggagaaaggcggtccttagggaggcttgtctcccgagtcaaagatggcgaggagaagcagaattgggcgggagtgcgctgtggcactactgctggcaggaagcgttgaatggcgaaggggagagaggcgagggaaggagaggcgaagggtggcacgagtcagcgaggattgacccgggcgagacgaggcgagcagagagaacgacagacggatgggttaaaggtctacaatggccttctatatcggattcttcttcgttgggcatgcggtcgggtgtcggcttcggggtaggtgaggtgtcgagaaaaggaggatcagaggatgggcagggaaggagctggtcgggagggaagacaagcggagggaggcgggctcaaagtcttgaagccggggtccgccgcgcagcagacccaaagcctcgcccgcccgctcaacgacaagctcgaggccgctcttcgtccaggcacgaggtcatggatcctcggccggccgacgctgccagtctccagctcgggccagcggctgggccgccgtccgacgccaggccatgctatcctcagcctcgccgtcgtcgtcgtcgtcgtcgtcgtcgagagaacgtgcgcggccatcgtccccaccctcgacgaactcttgctcgtagtcgtcctcgtcgaagccgtcgtcgtcgtccattcgctcgacgtcctcgctcccgagccgactgcccccgttcagctcgccgccggctagactcccgccagcgtcggtcgacccttcatcgccgagagccatctcggtccccgcgccctcgttcgcgccatcgtcgtcatcgtcgtcactctcgcggtcgtcctctggtccacgcttcgcgcctgccatcccaggcgggatctcgcgcctgacttcggccggcaagaggtcgcgcagtccgagctcgggccagccaatcgaccggccgccgctgccgcgcgtctgggccgagagcgcaaagaggttgtgggcgagcgagagtgaagaagggtggccgccgaggtcggtcgtccggttgagcgcgtacggccggccataagggtacgagggctgcgcgggaggagcgggagatcgtcaggacgatgaggttcggccgatgtgaagccggggcgtcagggccgtacatgcgctttcgaagggagcgctggtgaggaccggcaatgaaagaaggtcaggacgtcagccgagactgtgcaggctagagacgagcacgcgacgggtacacactctcatcctcgtccggcttccgcgggtcgcgctgcggcggcacgggcacgtctgcaaacgccagagagcgatcagcaaccagcacatcctacatcaggacccgctcaggccactcactgtcgtcgaaggccggaatcgagccgaagccgccgggcccgaaggcatcaggctgggtcgcctcggcgaggtcgagcgcgaggagcgcgccgtccgtcatgtgaagcgacgagaagcggccgtcctgggagcagcaaagacggagttagtccgctcatacgcggaccgaggatctcgcagagactgaccgtcatgctttcgaccgacgctcgcgtgttgtgttcgacgtgatggtcagcggcgaagacggaggagaagcgaagtcggtcgctcttggccgacgctcctccccccgacgacgaccctctctcccggctcgacctccctttcgtccagttgaaaggccatggcaggaccgtccgaccctatggtgacgactacagccgaggccgccgccaagctcgaccggtacacgacttttgcccagtcgaggctcgagccggcgctcattagcgtccaggcgacggcggccgagctcgcgaccgagcggcaagagtagtgcgtcctgccccacccggccgttaaggatcctcttgcggtgaggctgattaactcatgcgttctgcagtgccgagcttagggtccggctcgaggagatggtcaaggcggccgagcagggcagcacgacgatggagctactgaccgacctcggccgtgaggtctttgtgacggccagagtgtgagcaggcctcctccgccttcgtctgccgcctcttttgacgaggcgctgagcctgctttggccccggttgatgacagcccggacacgagtctcatctcggtcaacctcgggctcgggcagctcttcctccagctgacgccggccgagggcgctgtctactgcgcaaagcgcgaggtcatgctcgcgacgtgagtcccgttgagctggagggtccatttgcaaatccagcgactgactttcatacggtgcgctgccggtccgatgtgaataggcgcgcaaagctcatcgaggccaaggagctcggattgaggcagcagctcgtcgtcgtacgtcgcggcccttcccctggatctgatccacccgtctcaggtttcgatgctgacagcgcatttgtaatctgtctcgttcttgcagattcagaatgcgatgcaggacgtcctcgccggccgggccgacgccatgctcgccaagtagcttttgaacggacgaggatctgccagcgctgacactagcccgcaggcgaaacctctcagtgtcaacccggcaggcagacctccggcgcgacgagaccacgccttcaaagcgccctacctagccaagcgccccgcctcgccatgtggcaggccggccgagctacgcatcaacgctgatgcgtcacacccaaggggtttcgctgtgcgccattgaccgcaagcagatgataagtcgttatgaaggtcatgatggatctaatgcgcgctcgtttcttgcccctacgcgtcctcgtcgtcgtccgagtcgatgacaactctccgcttcgtcatcgaggagatctgagcggccggcgcgccgctcatcatcagctcgtcgccaatctcagactggtctctcggacgcgccggtgccgcatcgtcctcctcgtcatcatcagacatcggcaggggcactggacgggacagaggtgcaggagtcagcgacccaggcgagcgagcgtccagtaccgtcgctgacaggggcagggcactcactcggtgctgccttaaaccggggcttcggcttcggccgcggcttcttgctggctggggacggttcagcctccatctcagcgtcgtcgtccgtgcgcccggcctgcaaagggattatcgacggctgccgctcgctcgctgaccgtcggctctcccttgcgtcgttgtcgtccctgtccgagtctgtcgtcggaccggtcgtctccggctcgctgctagatccggcgcccttgcggcgcttgcgcttcttccggccctgcgaggccatcgatggaaggtcggcaagcgcgcccctggccgtttgcgcttccttgagcgcaatctgagccacagtaggaatgctgcgtcagtcgcgcattggtaagaggtcgaggtggacatcaactcaccatcgctgcctccttcgcaaagaactcggcgtcgcccgtctcgtcgtccgagtcctgaacagcgcaccctgccgggtcagtacgtgacagacatgtgacgaagcgggtcgagagagacggacttcaatccaggcagcgcttgtgtaatgagcgagctctctcgcctgcttggccttgcgcttgcgagcctgacgtgggacgccatcgtcgccgctactgctgtcgtctgagtcggtaccggacttgcggcgcttgggcgccttgcgaggcttgagcacccgtcctttcggcgcccgtcgcttgggcatgagcatctggacggcgctctcgccctcggcctgggcgaaagaggaagcgcaaaaagctgtcagaaacgctcttcggacgcggaagacgactggggacgcacgacgatcggctctcggatgaagagctcgatgatgcgcgcatttgcctcgaggtcggtcggcttcatctccatcggaatgaaccactgcaggggcggctcgttgtctgacgggagcagaggcgctcacatcagcggtcgtgcgcgagacctgcaaggctcaatagcacgtaccgagaccttcagtcttaaactccatcagccggaaaagcagcttgagctgcgagtcattcgagacggcgctcgttcggtcctcgctatccggaacgaccgctgagtggaggaaaagaatcactgtcagcagggtgttcaggatgtcgctggccggggcgactgacagtgcgcggtgaacttgctgagagctgcctccgagggctgctcgccgttgatcatctgctctcggatttcctcgtccgtcaattctgccgtcaccggtggcagaccatcggtgtggaagacaatctcgttccgagccgccgcggcgtccttgagagtctgcagaagggcgaaaccagaaagcaaagacgtacgtcagcattgcgaaggccggcgacacggcgctcgtccgctgcgtacctcaatcgtccaagtgacgagcgacatcttgcccgattcgagcagggcgccgacggcgatgccgatctgctgggtgttgctaagcgacttgtctcggacctggacctcctgaggcatctttggcgcctgaaatccggtcgcaagggcaaatgtcagcaggcgacaattctagatatttttctcgtttcacgcacccgcttgacccgcgaccgaccctgatccgtatctgatccgctcgagttgccgttgtctttgatccaggtcgagtgcgcctgccactggttgcggttctttgggaacagggcctcgacgacgataaaggccgacttctcggcctccttgaagaactgccggagtaggtacttgatcagattgatgagctccttcgaggccgggcccttgggcagcgtcgcttggttgtcgagaatgtccttgaaaagggccaggatcgagacctggagggccggcaggagaacatccgatgtcagcgttgccaccggatattgcaagggccttcgtttcgaccgaccttgaaaaacatgccctccgtcttgagcttgaccgcgatccggtagaggatgttgacgcagcgcttcatctggtcgggcgactcaaagtcctcgtagtgctcgaggaaggcgaggcaggtcgctacgacacgctcgtcgcgccatttctgtgcgaaaatgccaggcagggatcagtcggcagaacggccagtcgccaaagttggaacgggggggcgcacctcctcgaactctccgaatttgaagaggtgatcttggtagcgcgagacgttctcctcgatatagtcgtcctcctggtcctcgtcgctgtcgccatctgcagccagggaaaaccgtaaggcagaagtagacggtcagtgggcgaggcgccgaaagagcagtactaaagctcgcagcagacggaccctgctgtcggcgcttcttcttgccgcctcgcttgagcttccggatgaccatgctgtgcgcgttctccttcgagtggcgctcgagcatccgcagcaagacatacgaaaagtggatgatggtgtcgaggtacctgagggagtcggtggccgccggaaagtcagcgttggccatcgacaagtcgcacttcggtgggcccgagggcggacggacgtcagagactggttcttgtaggccatcagaagcttgatcggccgctcgagaagctcggcattatagtagatcttgtgctggaggatctgagccgcgtcgaccgggccctcctccccgctggcagtcatcgcatcgagcaaaaggagctggtcgaacaagaggctgtcagcgaccagggtatcagtcggtcgagcagccttatacaagaactcacaaggcgcgtaaagcagtggcaggtcgcctggatctcgacccagccgggcggctttcgaagttgaaacgtgtcgtcgtcgtcagcgcctgagatgctaggacgagagagaccaaagcaaggacggaccgagtcgtccatgacgagataaagccgcttgttgaggtgaacgatggtcgccatgtcgcagaactcggccagataaccaaagttccacaggtgctgcagctcctcccgctgcttgtcggcactctcgccggccttggctcgcgcggcaatgttgtcggccgccgtctggcgcgcgagcgtgaagaactcagccacaaaggagcacacctgggcaagtcggaggttgtccttgtcgcggatctttggctgctcgcgtcggatgtcgttgaggatcgaggcgacaaaggctgcaagagaacaaatcggcagacgtttgagctcagccggtcctcgcgaagctacggcaagactccttgtgcacgcactgttgaaggccgtgcggataaactcctcggtgaacgacttgagcgtccgcgcggcggtaggttggaggatgactttggtgtctgggttgagcatcttgatgctgtggacgtcgatccggccgcgcttcttgctgaggtccatgacggtgccgacgtcacccttgaccgcaccgccctttgagagcacgacgcgacggccgccaccggcctggacggcgacggtcgcaccaaagcgcgagtgccgcgaggacgtgttacgcgagccggccgtcttggtcaagtcctccttctcgagcagtgacgacagcttgtcgcgcacgacaaccttctggtccctgccgaggtcggccggattgacgccccgccacaagaggtggacaatgtcgagcacgagcacgttgtactggttgaactcgcgtgagtttgacgacgaagcgagggtgacgagcagcggcaagaagtcggacgactggagctggtcaatcaggagcgactgaagcgacgacttctcgacattgtcggccgaggtatgcgtagacgacggcgcgtccttgatcattgcgaggttgcggataatgtagagcaaggcctggacctcggtctcctgccgggccttgtccttgtcgcgcctagtcaggcagcaattggcgcttcagcattctggcatgcgcacggctcgacgttagggctgcagacgcacttggtctgcgctgcgaggtttggaagaaggaggtccatgagccggtcgaggacgatgccgggccggagcaggagagccttgtactcgagctgcgaccgggtcagcgacgcaaagtctgggttgacgcccgtcaagtcttcggcctccatcagctcggccgcgacatcgatcggccaggtgagccgggcgatcagtcgagctgcgtgggtcggatgagcggcctcgtcagttgactgtccaggcgcatcgctctaggccaagacgttgagtctcagacgcaccggcctttgatccgaccttgcggccgaacgcgcccttgtcgctgagctcgacaatgacggtgacgagttcagccatcaggttggtccgcgcaaaggttcgcgcgaccgtccgctcgtcgtcctcctcatcgagccgcgagagcttgaagatgtcgttcagacagccgacaatattgtctcccggccggtaaacggtcgtcacctgcccgctctcgtcctcgacgtcctgagggtgagagagcaaggcgtcagtcgttggtcggtctcgactgcgcgcgagccgagaacacgctgccctcgcgctccagcgagcgaccagaggggtcgggcgagtcgtacaggaacgcacctcccagccgccgagggcgttgatcaggttctggaccgtcggcataatgtactcgtcgagcgtcaggctgccgtcgtccggctcgccaatctcgtcctcctcgcgctcgagcccttccttgcgggcgagcttgacctcgcgcgccagctgcttgagccggagacgctcgcgctcctcctcgacgccatatccgcccatctcgcgctcggcgaggtcaagctcgcgctctgctgcggcttccatctgtcgagagcttgtctgacgggagcaatggccgatgccgacgggacgaggggtcagacgcgggctgagcaggaagtagaggcaggtcgcaccgcaccgttggccgtgcttcgatgcgatgaccgagattgattttgacgagatccgagggttgatcaggtgcacgagaggctacgaggtgcctgcactgctcggaaggggtcgggtgggagaggtggtcgaggtcgaggacagaacgaacccgtcggagggagggagcgacgcgtcccggcaggcaggcggtcatctaccgagccaacgcgtcgagtcgaggagtcgatgagcagccgaccgtctctccctccccatctcacccttctctttttcccccatgtcttctaccggattgtcgtcgtcgcccgagtcctgcacggtgctctacaagatcctgtccgagagcgagcacgccgcgctctacagctctgcgccagaagccggcacgcgctggtccggaacgtcgctcgacctctcggacggcttcattcacacctcgacagctgctcaggtccgtcagacactctctgtagtccgagtcttactgttgctgtgcgcttgattttatcgagctcctgggctgatcgtcgctcgactgctgcgggctgcctctcgcctcgtgtgcacgacctcagctaaagctcacgctcagccgctacttcaaggacttcgacagcgtccacctactggcgatcccacgctcgtccccgcgcatcgagcagacgctcaagttcgacctggcctcgaccggcgagcgcttcggtcacctgtacgacgggctcgacctcgcggccgaggtcgcgagccaaaaggtcgtccggcaggtcgacggcgagtggcagctcggccagctcaacttttgaaacgcaagatgctccaaatggaatgcacaatctctcctgtgccccttgcgagccccttcctgaatggcaggcctgcgagtgccaagctaccgatgccatcgctggctgctgtgaccgggctcggccgacgctcgatctcggcgcgcgaccgaccgaccttgctacctggcccttgacgacaaccgcctcgcgacctccttccgactctccgttcaggcagactagacacgcgccgagagagatggccacgcttgccggtgcgctccgtcaggcgtacgtgctcgcccgggcgaccgtcatcaccgtccaggtccggtctctcccgagctcgagctcccgcagctagcctgacggctgaccttgctacccccccaaacggccgactctatcaacagagcgcgtgcatccttcatctcctgacggaccggatcggctttatccagtcgtgccagggcgagtcgatgctgccgacgctgtcgccctcgggcgactgggtgctttactcgcgcctgccttaccacttcccccggctagcgacgccctttgccagaggcgacgtcgtcatcgccgtccacccgttcatgccggatcgagccgtcggcaagcggatcatcgccctggagggggacacggtcgaagtcaacccggctggcatccgggtcgacgtcgagggagctgctcgaggaaccgggccgaagtacgtcaagattccgccgggccactgctggctccagggcgacaacttgagcaactcgaccgactcgagggactatgggccgatcccgatggcgctcgttcaggcgagagtcgaggcgagggtgagtcctgccggcctcatcgagctcaatcagagcctctgctcatcggccccggcctccccctcctcagatcttcccgacttggacgccgatgcgcaataacctgcgctggctgacggacgagacggcggcatagtcgaagagtgcctgccaatctcggagcgctgcaccgccgagagcaagctgcacagtcgagcgagcgagacaaaagggggacggtcccatgtctatagcggcgcagccctccacccggcccgcctcggatgcgtcggtcctcaaacaccggtcgccctcatctggcacggatgcgagcgggtgcccgccccgctcacacgactctacaacggcccccgaaaacgggtggcgctcttgctcgcacgccgatgcaggctcgtacgacccacactgagcccctcgagggtccacgtgaacacccctcggcgcggtctcccttcctggccctcttactgggcgagggtgaagcgccaggccaggtaggcgacgaagacggcgagcgggaataggaacatgtagttgctgcagatcggacgtggtcgaggatgaggtcagccgagcggggcggagggcgaggcgcgtcgcaggaaggggagggacccacgtttgctgtgacggcgagacgggcttggtgcccgggacgtgcttcttctgcagcttcttgttaatctgtcggagggacagagacgcagcatctgaatgtcagcagaggcagccgcagcgacgcaaggggaatgacgcacgacaccgtcaaagtcgcccttgtacatgtccaggagcagcttgcgggcctcctccgagtgaccgacgtcctcgaaggcctcggtcgcgtccttgcctgcagtgatagagcgttccgtggaagacgagcgagcaggacgatcggcgtcgagaggagggacagcgcggggcgggaaagcaaaggggaaagaaagtcggacgatgagtgccgggcaacgacggcgaaacgcagctggcaagcagggaatggacggaccggcctcgctgatgatgacctcgtcgcctggcaacgcaaacaaaaggggcaaggaagagcacagtggtcagctacgtgagctggcacgacgcacgcgcctgcggtcgagggcgcgtctgggagggccctagctgggaagggacggacctcccgggtgctcgtccatgaacgacgtgcagtcgtagactaaggtcgcgatgaaggcaagagcagccaggcgtcagtatctaggacacgcttcggccccggtgggccagctcgcaacaggacagagggagcggagctacccacccttgccggaaatcaggatccacatatccttctgcgagccgtggctctcgagctcggcctgggtgatcttgcccgaggacggctcgccggccggagcagggtccgagacgatcgccggcacctgggaggacgggttggtagacatggcaggcggatgagagggaacgagagagagagaaggtgaggcgagggaggacgctgtcggagggacgagccgcctggcgttcgattcgctgctgggcgggccgagcgagcgcgcagccctcgcctagggttaccccccgcgcgcgcgagaaaacgacttcggctctcctctcgacctcgactcgtcctgcccttctctttagcagcagcagcagcagcagccttacttgcttgtccgagacctcgtcaagctctaggtccagaggtcgcgctctcatccagccgaggacagctctaggtcttacggttcagcccagcccagcccatgctgccgctcgctttccgcctgcgcgcgctcgcccggccagtgacctcgagcacctcgaggtcgtctagtcgcgagctctcggtctcggccggccggctcaagctacccgaccacaagaagaagcggatattaccccagcgcaaggtctttgtcgaccagaggatgccgattcaaaagacggacgagcagctcgagtaggtccttcctacctgagctgcctccgcgcactccgcccttgacgctgacttggtggcctctacccagtgccgagagcattacggaacagctgcggcaccaggccggccacagtctcaagacgcgcttcaagggcatcaagtaccaggagcgctacttcaaagacgccatccggcggtcggacaaggaaatgatgaccgccgttcgtccactgctactgcgcttgaacccccgggcgaggcccggctgctgacacctcttttcggtacaacgcatcgcaggcaagtctagagggcctgccggacctgaccgaagctcaggtcgacgacttctacgcgaacttgatggcctccggcacgacgctcggtaacctgccagaggtggcctcgccgactttcaaggccgcgaagcctctcccgtcggccgattccatcaccgaagagcagtttgctaccctctcggacgaggccaaggctcagatcgccggggagcggcagaggctgctcggcgcgcttgccgggcgcgagcgccggcgccaggctctctttggcgcactcggcgtgccggcagagaacctcaacctggagcacagccacgagcaagccgacaagagcgagcgccttctcgctgcgctggagtcggaagtctcggtcgaagagcaggacgagggacagatcttcgagacgatcggcgtccaagcctccgatgcttcctcggctgccgcaacgctcgaggtcggcgaagacggtgacctcaaggtttcgaagccctcctttgtcgctagcccggttggaagcgctgggccgacctggaccaacagctcgcctctccggtctggccttccgccgcgagagacaccatcggccgatgccagcccgcaggcgcccgaccagccatctccatcatcagtcgtggcgcccagagtagctgtgggcgacactccctcgacagcagccttactccgaacggtcgtcaacccaccgaagccttatcacgacccgcccttgaaccagctcgcgcgtcggcgggtagcgcgaccggacgaccggctcgagccttggagcgctctcactcgagcgattccggcgccgtcatcgagcctcaccctactcgatacgaccaaggacacggttgaacacgcattggcggcggcggagagcgaagtaaacggcgaggccagcacgatcgacctcggtatcctgacgcaagccgaatggacggacctcatcggagcgttcctgtcgaccgagatcaagcccgtcgacggccagcaggcatcatcaagcatccagcatcagttcgtgcgcctcgcttcgcagcaggctcggcgcaagaggcgccacgaacatcgttcgaggccgctgctgcctctccggaagctcgagcgcgaccggctggtcctccttcgagagcgcggcgacctagccctcgaggccctcgagacggcctggagggctggggccatgtttgaccagaatttgaagctgctctccgaggttgggagctttctcgtccagggcggccacgtcgagggcattgatcgcttgctgagcttcgtcgacacaaagtgtgcgccgccctcgtccttctctggcctgcgatggccgtgcctccctcgcgcgtgcgcgttatctgcacccacagctgactggtcgccctctaacctttgccattttttagtgcggcagaagccgattaatcttctgcaaagcttccgcgtgacggtccacctcaccctgaacgacatccggacggctcttgcgacactgcatgagctcgaggacctgcaagttgcgcccccgcagtcgacctaccatgccgtcatcgctcagctggtccagtcggaagccccctcgcatcgggcggccggctggaacctattcggccacatgcggcttgtcgcccacccgacgccgacgctcgacctctacaccgagatgattgccgcctgcgcccatcagacgtacccagagcccgagcgcgcgctcgacctctggaccgagatgacgattgacagcggcatcctccccgacgtcaaggccttcaacgccgtcttgctcgcctgcggtcgcgttcagcgcttctacccggagacgttccggctcatgcggcagctgctcgacttttaccagacgagcccggacggcacgccgcaaaagacaatgtacacaccgacgcgggcaacattcgacgcgctcctcgacggctcaaagcgcaacggcgatctcgcgcgcgctcgctgggtcctgaccgagatgattcgcttctcgaaccacccgggctttgccaacgacggcgaggacgtcggcccgacctccgacacgctttcaaacgtgctcaagacgtacgccaacagccaggccaagatcgacaaggccatgcttcgaaagaccgacggcggagcgtccagggagcccctcgaagaaaagccggagtcgtcggccagctcaggcagcgggctcgaccacgagcagatggtccgcaagatggactcgctcggctttgagggcgccaagccggtcgaggacgaggtcgttgtcgagggcgagagcgctactcagctcgagcagccctcgctcgactcccggcgagcggacgacagcagcgaagagatcgacaccgaacgcgcttcggccgagaagcccgagggcaatgtcgcgaccgcgccactcccgcagtcgtcggcggaaatcgcccgggaagcgacactcctcttccgccacaccctgaccgactggaaggtgtacgccgccggcgagcggtcaccgaccggcggacttccgccgctccgtttcgctcgcgccacgaatagcgtcatcaacggctacctcgccgtcctctacaaccacgactcgtttgcgaatgcggtcgccgcgttcaagactgtctttggcgagaccggcgtccatcggagcggccactcgtggcgttactttctcgagtttgccgctcacacacgtgatcgcgagctcgccgccatcgaagcgcacgccctctttacggagtgggagcagtttgagcagcaggccaagctgcaattcgatagactgcaccaggacgagggtgtcgacgtcgccatgggcttttacaagaacatcggttacacacccgacaacattcgccgcgtctttgccgcaatgatcaagatcatggcccggtgcgtggcatttctcttcttctgctcttccggattgacgtgctgaccagggcctctctgattgccgcggctttccgcgctccagagccgaacagctcgtcatcgcacagtcgttcgtcgagcgctttgtcgagctttaccctccgtccgacatcgtcgccgccatccccgagccgctgccaacaaagtcgctcgtctcgctcgtcccacgggtcgctgtccggcccgacccgcttccgccgcacctgctgtttgccgatgtcgaggtgctgcacgagcgctacgtcgtctaccagcagacccacggcctcgcgtacctcaagcggaccacaagcaattacctacgtgcgctccaaaagtaccgcgactctcgtctctcgcagggcccggagggcgaggtccgggctaaggagatcgccacgtcgcgcgaggaggctgctttgtggcgggctcagatggggcctcggcagcctgtccaacgctacctgcggaagcgcgagcgctcgctcgaggattttgaaggcatccaggccgacattcctgacggcggcggcaagcagcgcaaggatgaccgccgccgacgtatgctcggcgagcgcgccaacagccattatcaacgcggcctccgccagttcagctgaaggagcctcgccttactgctgtcgccccctactgcatcttccagacacctctcccttcacatttacacactcacatctacgccgcatcctcacgctcgcatcacgacaaacactcatcatgacccttccgctttcttgaccgtcgctgtgcgtgcccgcaatgcgatcactgggccgagccaacgccgctgcttcgcccgcaagtggacgactcgacacagatagagcgaaagaaggacattgagacagagcgaaagagcgagcaggagagcgagcagacagagcgatacagacagagcgagaaagacaaagcaagggcgagagagacgagggagcaaagcacaaggcgagggaggacagagcgagagacaagtcgagaaggcgaggaaagaccaacctgatcagcggcagcgaaggccgctgggtgatccgccaagcgagagagcaggacggcgaggagaggcgggaggaggccgtcgacaggtcagcgactgggcgagactgaagcgagagggcgatggaggacgcaacgatgcgaacggaaagagaaagcgcgacccgagaccgacttaccgatgcagagactgagacggagggggagcgcgacctaccgttgcgagtgcgagtcaactcccctctcgcagatgtcagggtgagtccttgtcagtgttatcaaccgccgacggcggctacgaggtcaggcgtgaggcggcgacgagtccggcgaccagcaggcacggcccggggggtaagcaccaaagacgatcgccctgatccgattgatccgcttctggtgcgacccagccgcttgcttctgcgacctttgcttctgggccctcgtaaggaggaaagccaggcgtgagcagaagtcagccgagacggggacgaagagccagcagcgatagtcttgagagcgagaagagagcaagtcagcagagggcgttcgaaagaatggcagagaagagggactcaccacgctggccatcgtcgtggagcacgccttcctcgcatcgagagcctccgcctggagcgggtccgtcagcttgcggctagcgaggaaccgaggaacttgaggaacttgacccgaagagacgtctcgcgcccgcccgtctcgcggccttcaggcaggtcagttggctcctcccaggttgtcaggccagagtcgctgcaggcgcggaggagcgagttgggtcagtctcggtgggcgagcaggaaacagtgggagagaggagagacacgtgtcgatgtggaagaagcggtggcggccggcgtcgaagcggtggacccagccggcagataggcccgactggatattcttgtccttgaggtcggccgcagttgcaggaggaggcatgcgccggtcagcagcgacggccaccggcacgtcggccggcggcgaaaaggagtggcctacctcaaggtgagcttggcgcgggccgcttgaaggccgagcaggccgcgcgccacaacctcgacgtcgatcatggcgacgtcgtgcttgaaggtaggcgcggacgctgtagcaaaggtgggagcggggacggagtcagcgacggccgcaggagcaaggacagatagagcctgcatcgcttcggcggcctcggcagccgtctcgtctgaaatcccatcgacagccgactccttcttgacctccgtctcgtcagccatcccctcgggctgctgggccggctgagccgggtccatcttcgtctccttcatgacattatgagccttagcctgggacttgacgccgcgcgtgcgcgcgggctgagtgccggcggggcggggcgggtgttgcgaaaggtgctgctgggcatgttggatgggagtgaaaggggtgtggagtgggtggtggtggtggtggtgtggaaggatgggcaagaggggtaggggtagcgcagagaaggtggtgagggtcgggaaggagcgggcgaaaggcgcagacgcgtcgagtggcgtgctgcgcgatgcgtcgcgctgtgaggcggagtttggcctctcgagttgcgctggtgctgatcttgccttgcacatggcacctcagacggtcgcaagagtctggtcggatgcagcaaaacgagaccaacttctgcgcgtcgagagcgaccaggcgatccctgatgggtggcgcaagatcagcggtcgaaggtgcgccgagcgcgccggcggcctaatgccacgacgcctcgaattcgaggccagcctgactgccggcagggcataccggccgatatggtcaatgtaggaagaagacggttcgttgtaaagctccatcggtctgagggcaacgtcctgatcgtcgcaagacaggccttctcgaatccgacggcggggcaagtggaggtcaaggcggattgccaacgcggaggggggctagcaatgttactcgtgcgcagctagtaagcctgactgcgtcgccttgtcagcctcacacgcgagcactcgtcaagctctgatcgcatcgccggctgtcgatctgcgctgtggcgttgcgagcgagctaagatgagaccaggcagcagcaacgtgcgaggtgaaaaggtcatgcagaggtgggtcgtgaggattaggcgggcgtgaatggcaggggaggacgagagaaggtcgggtggccggatgtcgtcaatggtagagtgggggcgtggatgacgagcgagcgacgagctcgtccgtcgttggcagaggagcgtgaaggaggcagtacgccgagaggcgcctctcgtttgaccgcgccatcgaaggggcgggagcagtgcacgcgagaatcgagcggcgcctcgtggttatctggcggtgcaccaagcacacgggccgatgctctacacgagggaccgcgagagaaagactgagagttggctacccgcccgccatgcggcctgcccgcgccgaccgaacgcacgcgccataagcaggccgccagcgacacttggaccgggctagcagcgagggaggtcgttgacggcatcactccatcttgacgtcggcgccggccgagcctagcgtctcgccctttgcgatcttctcgagctcgtacgacctagcagcggcggcggtacgaggcaaagaggtgagtcgggcgtcagtctctgaaaggtaagggaagctcgctcagacaaacgcaccggtcaaaccacttgttcggatggtcgacagcctcgccccctccgacgccctcgcccttcttcacgcccgccgccccctccccgcgatgcgtcagctcgaacacccgcgtgcaagctacgtggtagtgcgtctttccgacgatgccgagcacctcggccagctccgggccagcgaggctgtaggacgacgagaggaagagggaaagccggtcggaggcaaagtgccggaagggacagccgtgcgtgtcttgggcgccaggttgcgaggtcgtcaggatctgctggcacctgcgggcgagcgggcgggggcgcgggcgcgcgcagtcagcctgcctgaggttctgatcaagccgctaccgttcagaggggggacgcacgactttggcttgtagttcttcttcccgccctcgaggccgtacgagtgccggatgttgtagacgtggtccttcttgaacttatcctcggccatcttgctcccgacctgaaacagcttgcgccagaagacgagggcctcgtcgatcgagagcccgacgcctttgagaaagaggccaaactggaggcgcgcgaaatgcttgaggtggtgggcggacgtgcccgtgtcgtagaggtggcgcatgcagggcgggaagtgctgccgtgcgagtgcgtcaatcatatcggccgttatgcggtcgcggtcgccgtctgcgcctgcgtcaaacgagtagtcggacgaggacgagccagagagatacgaaagcgagaggtgcgagaggatcggcagcagccggctgtcctcgtcgagccgcgggaggtactttgccgtctgctcgagcgaccgctcgagccggtcggtgaactcgcggagaaggagcgagagctggtcgcgctcgctgacaaaagcggagccggcgagtaggacgaccttgcgctgctggacgagctcgggaacctgcgtccaggggaccttaaagaaggtttcggaggagagtgtccaggacgcgtcggccgctcggccggcggggccgtagacggtcgtcagctgctccttcagatccttgttgtcccagtcctcgtccgacatctggcgtgcatgggtcaagacgtcaaggtctggcgttctgagccaggcgtttcgcgcacgcgacgcaccttgttccagctgaggttgaggctctcgatgaaccgccggcgttcctcgcggtcgtccgactcgtacctgagccgaaacagctccctttcggcccggacaaaccgcttcctgagctcgtcactgccacaaaacgcgagccggagcacgaagtgcccgaccgcgtcgcgccggcgctcgagtgcgaggtcgacagatttccgggcggtcgaggaggacagtgggaggtgtttagcggaggcttgggtgtaggagagggtgagttgggcatgggggaggttgcggatgagcgaggtctcgatcaaggcgatcactggagggaagggggacagcgagagggggtcagtgaggcggtcgtcggcaaagctcgagggtcgacgcgtctccgagcgctgttccatgccacgagctgtgcgacgcgtgtgcgggcgtccagaagggtcagagcggggacctactcctcagcctggcgatcgcatactcttcaaattgctcgagcgtgacgtcctcggtcggcggctggtggtagctgagagcgcggggagggaggggtcagcgacgcgtcggtggcgcctcgcggcagagagagggagctcgagtacgcacaagttaagccggtgcgggtaacggccgtcgtgctggagggtgacctcggccgggccagctgggccttgggtgcgcggggcggggcgggcaaagatcgacatggctggttgaggtagagaggagagcgagggaggacgcgccgggaatgaggttgagctcgagggcgacttagggttaacgagaggtcggcgacacgatggcgaggcgagcagccagcatgacagcgacagcgacgacgacgatggcgaccgacgacgggctcgaggtcggcccggccttctacgcgtgctacctcctccactcgaccgccaagcgtcagaacaggcactatgtcagtccccttcgcgcgctcgagagaaggtggcggcggcggcggcctggccggctgaggtcgtcgtgcggcccacgacacgagcgggcagcgtagagccgagcgagagggcaggatagactgctcgcctaccgtcctctcgcccgcttctccagccctgccgtcgagcatcgagctcgagctggccgcgccaagagcagacgacggtcgggtcgaccctcccgtcgccgtctcgcgcgcagctgcccgcccaacctcctcctctaatacctcatctgacgcccctccctaatccctgctattgtcgctcttaaccggctctcacccgccctgctctgacctgcctcgcacagatcggcagcacgccggacccgccccgccggctaaggcaacacaacggtctcctcgtcggcggcgcggttcgtccccgcacactcctcgctgcccgatctgacctgacctgcatgtcccacccaccccgccccgcccggagcagaagaagacgcgcgcctggcggccgtgggagatggagctcgtcgtccatggctttacgagcaagctctcggcgttgcaggtgcgtctgtccgtcgctcgcgctctctgggtcgttggcacgacggcaacggagacgtcgttcttggctgggaggggagggacaggctgacgtggtgcttgatgcttgggatttgggcagtttgagtgggcctggcaacacccagagtccgtcccccttccctctcctcttgcctcttccaaaccgacgctgaccgcccatcgacgccgtcgctctcctccctcgctcgcagtaagacgcgccacctcgccggctcgctcggtccgcaggcgcacctcggaggggcggctcagaaggtgctcgtcggtgcgtttctgctcgactctcgcttcctcctcgcttgatctcgcggctgtgagcgtttggggcttgctacttgacttgtacgatcactcgcaaaccatggccgtcggactaacctctgccgctccactctccacttccgcgcagcccgcaaactcctgacggttacccccttcgccggctccccagcaagacaacaacaggaagagacggcgagacgtaccggcgcagaagcaggccgtgacgtccgagtcgtcgtcgtactggtcagagcagagcgtcgagacctggaggctgagagaggaggagcaagaggcaggtcagcgacgggtcgggcgtgttgttcggagggagggagggaggggacagacgttgtcgagcagtcctggccacaggcggcggggacgtcgctagtcgaaagcgactgggcctgggcgacggcagcgaaggcgaggagggcgatgggggcgatggcgagcattatcggcaagaagaggcgagagagaagaggcgagagaagcgagaagaggatagcggttgaggggagcaaaggaggacgcgtcgcgcgcccgaccttttgtacccgcggccgaaatcaaggcccggctcgcgtccgcgcttccccacgcttgccctgcatcggggcccccttcctcgccgccgatctgcatggaaagtcaagcccgccggggccgagcgacgcgcggcagctgcaagcggtctacaagaggagctatcgatccaacaggaagaagagcacaagcgagggagcgtagtggagacacaggggcaggaagggagaaaaggggcgctgacaggggacgagaaaagatgaagctcctcagagcaggagagggaggaattggctggaggagcgggagggtaaggagggcggagggtcagcaagacggcaacgagcgaaaggactgatggtgccaggacgtacgcgatgatgagagagggaaagtcaaacatctggcgagagagaggtatcaggatcgtcagcgagcgaccagcgggcgagaggcgaaggagagcctcacgtcacgccggatgctaaagcaggccgtgcacgagatggctcggccagagggcgtgagcagcgtgcagacctgcttgaaggacggcatcgtgccgtcaaaagcacagcggctgaagttgtcgtagaactcgatgacgctggggcagagagcgcaagcaagagtgagcggacggtctaggcgggcctgcgagcgagagacgcacctctgcttctccatcacctcccagcagaagcagcccttccagccttcaaagccgtccttcatgttgcctccgccggccgccgccccgcgctcggcgagcgggacgtcctcggtgtcgcgaaagatgaggtcttgctggctccactcggtcaggatgcagaattcggcgccgacggcgagaatctcgcccgtccggcgccagattgccgtcggcgttcccgtcagaggcaggagggtcgctgcgaggtcgcgcatcgcccgctggagcgcaatctcgaggaagagcgtgtcgtcctcggtgtgatgggccctgtggcgttcgggaggcggcggcgtcagcagcagtcagacccgccggatccaaaagctggcacgcacgtcgcagacaagaccttaggcctaaagtcggctatgctctgaacgaccttgagcgcatcagactcgtcgtaccggtccttgacgtggctgatcagccttcgataggcgcggccatgccgcgtggcgagcgcgtaggcgtcgttcgacccagactgcaatcggttgcacgccgtcagtggctgcagcggagtgctaggcccggcgcgacaggcagaacgtacggcaaagcctcgcaggcccttttctaggccttggtcccagtgaccgccccggccgttcggtgccttcggctcgtcgatgaggagttcattcggatgcggaggcgcccgccctttgcccttaccatcctctgcctcagaggctgacaaaagcgaccggccaaaggccgcctgctgcgtgctgatcgtcgtcggcggactcgtgtacgacgcccggagctgctgttgctcgtcggcgtatagccgctgtgcgtcgtaggcccgctgaggcgcatcaaagacgctcgaggcgacgtgcgagagcgcattgggcgagctctcgggcaccggcgacaggtcgggccaaagaccgaggtggttgagcgacgatggcccgcccagaccgtgaccagccgatgaggacccagctgcgtcatggctgaacgcgtcgccaaaaggctgatggctcgcccacttttggacgtcggctcgagggaggctgccaagcgacgacaagcccgacagctgtcgactcgggtcaagcgtcgacgagatgctggagaaaaagtcggcggggagcgtctgctgatgctgaggcatcgccggcgcctggcccatcgaggcgtcgaaggtcgaccgcagggtctcgacgtgcgggccgtgcccgttgctcgattttcgcatcgagtgcggcccctgcgacggctgctgggcttgcgatgacgacgacggcgacggcgcccacatgtagccgaggccgccaaagctggtgacgttcttcggcggcgcggccgtctgcgctgagctctgcagcagatcatgtccgttctgcgagagcgtgtcggacgtcgaccggatcggccctggcggcggtgacctgggtgcgacggaagcagaggtctgggcaagaggcttggtagacggttctgcgccgccgcccatcgacggctgcgacgcatcagacgcgcgactcgtgagagccggtcgctgggcgttggacgccgagctgctcgaccgacgacctttggcgaccggctttggcaagctctctgagaagcgcagacgacgaggagttatgtggtaagtgttgattcgtccgtcagccaaggcggtcgggggccgcggccaaggccaccaccgccgcggacgcgcgtgtactgaccgagttcttccggcgtgtagaggtagcgagccttcttcttttcgccctcgacgcattcttcgccgcgcttgatgcagcgtgcgcacggtctcgtgtcggagcatgtcagatgagctgcaagaaagaccgcgatggagggtcagcaccggacttgggcggcccgggacgcgcgagccgacaaagaggctgggcagccaccgcgcgcgaccgacctttctgacagctttggcaagctgcgtcgaggtagaagccgcagagtatcttggtcagcgactgctctggggcgatcttcatttgcgaaggtcgggcaaacctcggctggccttgcgcttcttcttgaccttgtcgcccggcttgcacccggcggggtcgtcgtcgcccgccgcggctttgggcggcatcctctcccggtggatgctggctcaagtggtgaaggctggcgaaaaggaacgtcacggatggcgatgttgcggccgtactgaggtctctcgctcgagcgaggaagtcagagagattgacctgagcagccggcgaggtgatgcgcggccggtggttggaggcggaggtcggcagagtgggctcgcgcgtgttgttgtcgtcgtttcctcgccggggctggtcgcttcaagaaggcggcgcgcggtggttcgcccctgcgagcagcagcttggccgttgagctcggctgaggatggtgctgaggcgaggcggggcaaggagcagctggtcgtcgtctggtggcatgagcgacgggtcgtccccgcaggcgcacttgcagcgcgagctccccgtcaaccttggctttggccgctccctctcaaccacactcaagccaggacgaccagagctcctgagcgactctgtcatgtcaatcgcaagcctgatagccggcgtcaccgggctgggtgcttccctgccgtcgtgctttgtctgctgccaccgccgctgatccccggccgttcgccacccgaccgactgcactgcagacgacgagacggtacagacccagatcctgccctcgctcgacgcctaccagtcgcgcgatgcggtcaggaatcatctcaaggtacgagatgcccgggcgtccacatctcaggtcatgagagagctgaccaccatcattccctcgcttgctcgtctcagacgctcctcggcagcggcacccaggccgcctttgcgatccaggcgtacatcgactcgcagcctcgttttgcgccaaagccgattccatcgctcccggcctcgccgccgcagaagaagaagggccagtcggtcaagtcggctctcaaatcggcagcgccgcgccaggtcgttgactggtcggctgagtcgagcggcaccgtctaccagaagcacaaggacgatgacggcctcatctggggcagcggatccggcagcggaacgagccaagcacacagccgagcgacaagtggccggacgactcctctgcccatctcgggccaggcgaccatcaagcaggcccacgcgaagaagggcgggctgacctcggacctcctcggcggcggcgcagggtcgtcgacctctggccgcaaggagaagcttcggccgccgcagagcgcagaggtccagcggctcgagacgctgtttggcgacgtcgaggcgagcggcgaggacgggaccgagctccggaaacgggcgctcaagaagaataagggcggctgcttctgcatgggtgcgctctctcatcggccacggtctgcgaccgagactacaggctgatgtcctacttgtgcaggccgcattcacccgctgtcgacgtacacggcccagtgcccaggttgcttcctcccgctctgcacgctccagctgccgtatctgccgtgcccgtcctgctcggccacgttgctcaattaccagatcaaagctcgcctgctcgtgaccatccggtccgagctcacagcccaggtcctcaaggaggagcgcgagaaggcccggctcgaagaggaggcgcgcgagcagatctggcgcgaggccggcggcggcgcgtttccgaccctaggcggcggcgccgtccccaagcccgcagccgaggcccctcggcgtgttatgtcgctcaacccaaagacgggcaagattcagatgacggcctacgtcaagcgtgactcgccagcatcgtccaggccgacgtcaccgacgcccgatgtcgacgatatcggccgcatcgccgccccgcggactgcctatccgacgccggcggagcgcgaggagcgtcggcgcgtcgtccttggggagcgggccgcacagggccgcgcgttcctcgatgtcggcggcctgcaactccgctactatgagaagcgagtgcttgccacgccgcaggaggcaggcggccagggcgacgacggcaagaagaagcgccgccgaggccgcaacaagggcaagggcgagggcggcggcgacggcggcgagacgcctgtagttgagcccacggccgctggctcgggattggtctcgccgagtcgagcgccaggcgagcagggcaagggcaagaacagagagacacttcctcctatgtcaaaggtcagcccgggtcatggccatcgcatcttttgactagagcgctgacggctcattcgtttcgccgctcagctctcgctggaaccgacgcctcccaccccgcggtctggcgagacggctgcgtcttcgtcgcagtactcgccggcccatccgccgccgatccggctgctcgtgcctggcgcgaaggtcctcgtcgtccagaagcaggaccagccgagcgggaagacgactgccggcgaggtgcaggaaacgctcacgcggggcgaccatccgagaggcgtcaaagtccgcctgcggtctgggatcgtcggccgggtggttgggctccagtagacccgtctgctacctcgcgcggcgtcgaatgaaagatgaatgcgtgcgaattgctggcgacaggctgctgaaggagagatgccgtacggcgaccgcagctgaggcgagctttgaggacctgctgcccacctcacgacgggatgtggaggtggctgcctcgcggcggcagcaaccagtcgcggacgaggggcgacactccgagatcctggcgagctcggggggcatcgcaggtgagcatgatggcggcggctcatcgacagcatcagtcgacgcaccgggtggagcaggacgaccgtcagccattcctggagccttcggcgccgcttgtcgaggaagcgctcgtcgaagcggcgcgggcccgacttggatgggaagcggcccatcgccagccgaagggtcgggtagacccggtcaagccgctccttaaggtcgagaaagtccgagtagcgcctgtggaggacgatgggctcggtctgcccgaagagaacgatctcgatgtcaaagaatgtgatgaccttaacgttcgaccacgtcttgatggccacggcttggacgaacggtcggagcgactgcggccggccagcgcgagcagacgcggccgagttgtcgaccaggcggacgtgcgagtcctccggtcggagtgccagtgctggcagagtgcaaggaagtggctccagcatcatggcctgaggtgatcaacgcaaagagagagaggatggcggggcgggctcagcggacggcctcgatcatcttggctgtaccgcctgggctgacctcgtcctccgaaggcaggtcgtcgaccgacgagctccacgacagccggacgagctgcgattggctcgtctggaagctctcacgcggcctggcaggttgctgggctgcttgattggcaggtgagctgggccgagatggaccgagctcggggctgtcgccgagcgagtcgtacgtcggcggcggcgagagaggcgtttccgaggctgcggcggctaagccagacatcgggcgggtcttggcacaacgatgtgagaccgaagacgtcaggctactgctgctatccgagcgaggcgtgagggctagaggatgggcgttgtgggcttcttgggagcaagcgatctcgcgtcgtcaggcgagcaagcagcagggctgcgcctgccggggcacgcccggccaacgacggcacgcgtaccggcgaacgtacgacgccacttgccgctccgctacaaggccgacgggacaggagagggaaggccgagctgcatgcattgcaagaagactacaggggtacgtgggtaaacagggtgcagggggtgttggcgttgcgggcgagaatgatcaagcccgggggcggtcgacgagtggcagggcgacaggggggcggtggacgatgagtggatggtccgagtcggtggctcaggcgccggccttcttgcggcgctccttctcctttttacgccgctcctcctcctcttgcgcccgcttgtcctcgaggcgggcgaccttggcactccggcgctcctcggcctgagcggcgctgaagccggtttccatgtcgtcctcggagtcggagtagacgttgcggccggcgtacctgcgaagggtgggttgggtcagcgcaagtcggccggtgcttcaacgcaagcttgcctacgcacttgctcggatcgagacccatcgcgtcccaaatcatcgaccgcagatctcccccaccgccgccactcccgccggccttgcgcttcttgctccgccgacgatcagagccgctgctgtagccgtccgagtccgagtcgagctccgaggacgacaggtcgcggtcgcgatcgcgcgcacgcgaggcacccttcttgccagccttggcaggcgggccagagttgaaggacgactttggccgcttgaccgccggcggcggtgagactgagcgggccttcgtacgtgcagatgatgggaccgtccggcgagcggagctggccgggggtgacgccttcagctgcgatggccgagaacgcggagcagcggaggtagaggtggaaggggctgatgggcgggaggagggcgatgccttgctcgatgaggctgcgagtggcatcctggatgccgaagtagaggccgtcggctgcggctttgtgagcttcgccggcgaggacgagcggtcggcagaggctgcaggctcagccgccttgttcggcggggctgctgacttcttcgcaaagacgagcgcgacgcgttccggcttcttgagcaggctgctgacgtcgacctcgcgctcgcgctcgagacgcacgcgctccctctcacgcgcacgccgcttctcctggagctctcgatcaatctcgtcgatcgaccgcatgtcgcgcttgtccttgttgagcgcgcgcaagccctcctcggcgaagcgcttgttgatctcggccttgccgtggttggcgcccttggcccgcgagagcgtcggtgcccgggccgacttggacgacccgccgccggcactgcgcttgacgaccgacgcagtcgagcccatctcgtcgccaaagattgacttgttctctttgatctttcggagctcggcccgcgtgagctcctcctttgctggcttgccgccggccttgcgagggaagagtgttgctgccggacgagagtagctcgaagccaccggcgccttgaccgcagcgggcggcggggcctaggcgcgtgacacgagcgagggaggtagagctcgaggttagcctcagcaagcgacacgacggctctgccggacgagacagctgtcgccagcgtctgcagcctgccgcacgactgaccttggccgcctcttttgccttctctcgccgccgctgctcctcgcgctcctttgcctcgcgcgcctcacgctcccgccgcgcccggacctcggcgtcgatgcgctgctgctccctctccctcgcttcggcctgcaagggtcaaagcgacgcacagcatcagcgtcctctcttggcgtcggctagcagtgctcagcagagggaacggcaggacgcaccttctcgcgctcgaccttctgcttcgcttccttctcggcgacgagccgggccgcgtcggcgacggcctttgcctgcgacaccttggccgcctgggccttgagcgccttgtagtctgccatgaaggccgacaagcggtgcgagaagcaagggtctagggtggccgaaggcgccggggatctacagactggagaaacggggggtgggaagaggacggaggtgatggtcggtgagcggcggacggtggtgacgctgcgctggcagcaagagccgccgagccgcagctgacacgagccggccggccgacggacgcttgatcgaacttgagccattcagcttaagagtggcagggatagcgctcagagtagacgtagcagatgtgtcgctcgagggctccgctcgctcacgtgagacgggaggccgcagcatgcgctcccttggaagacagacggcacatcgtacaacagctcttctcaccccatctaggccgaagtacgcgctcagcttagcaggatgcggacacccatcgcgacacaggcgagcgagacgtagggcgacaggcggtccccttgcgttcacggggccggacggcagggctctggtcagcccttctcagcgcgcgttgcgcacgagcagcgacaggagacgcaccgatgcgcgaacacttccagaagaggccggcaaagccctccttgttgcggtcgacaaggccgggcgcggtcgaccggatgaaggtgcacgtgcagatgaacaagaggatgcacagcagcagcgacgagaagttgaagagcgcagtctggtagcggtcgcgaccgggagcgaaagggacgactagaggtcagcagatgtcggcggcgtgagagagacgcatggctgagaatcttacgcaccatggtttggaagcaggcagagaaggtggaccggtcacggaggttgaggttgacgaggtcggagggcgttcaggcggcggtcgtgagttcgagctgcgagttggtcgaccgggcaccaagccgacgaagatcagcggtcagcttttgagtagagcagggcagcgcagcgcaagagatcgcacctgtataggatccagattggcagtctcgatgaaatagaatgggtgttgcgagctgctcgagaccgaatctcgaccttgcctctggatctcgtccgtcgaccgtcacccccgcgcctctccctcgccaaccgccagcccgccccttcaggacctccctcacctcgtcgcctcacaggcatctttcaagccaggagagctccgatccagacgttcgcagccctagccttgtagaactcgcgaagaccggaaagcgatggcgtcctccgccggccagccgtcgctcgtaccgatcctcccgccggcgccgcacgagccggtcgcccaggccatcatcctccggctctccgagagctcgctcgctgccctgcgcgacctcgtccgctcgggcctgctcgacaagcccggcccgccaactgttcagctcgaactgaacgacgccggaccttcggtgcgtcgtgcctgggcggatctgtcgaccgccgcccctttcgcctccggccgactgccggctctcagcccggcagaggctcgatgtcgctgagctctttgtctgacctgcattccttcaactgccaggccctacacgtcctcaacgcgccagcaccgttcccgctctcatcgacgaccttctcgccgccgctggagctcctctcgcgccgggcgaatgtcgcgtcggctcccctccatctcgccgcgctcgcccagacgcgatatgctgtcaggcatacggacgtctctcagtcggccaaggagcgccttcgcgagggcaaggagaaggaggagcgtgataagcgtgggaggaagattgtccagctcgacaatgagccctcgcgggcggtcaccaagggcaagggccgggcaacggtgagcggttcggccgcgacgcctgggctcggctcccgctccgggacgcctgctggccggtcgacctcatcctcgagcaggacgggcaccgaccgcttgcagcctcccggtcagcaaggcgtgaccgccgcgtcgtcgtctggcagccgtcaggggtcgcgcagcccggcaccgcccgtctcgcgcgagacatcacggccgggcagcacgccactgcgaacgcggatccttcagctgctcgcgctcggcccgctagcgcagaggcagatcgtcggcaaagtccgcgccaacgagagcgaggtcacgcggatcctgtccgaggtcagccgtggctccaatcgagtgcagtcgcgtgaagagactgatccgcccgtcgcttcaaacataccccgcagatcgcccggccaacctcactaaacgcgagtctgcatcgcctgctgccgcagtcgtacctccagctcgagatcttctcgtggaagcagtactcgcaggccgacaaggcgatcgttattgcggcgtgcgagcaggcgttcgacgaactccgcctaccgcgcgacgccgaagagcggcggataatcgatcccgagtggaagggcggctcgcctttgaagcaggtgctgagcgcggcggctccggccgcttcggcctccaggacacgcgatgggtcggccgactcgagggcgtcgctcgagcgcaagaagccgcgacgagaggcctcgccgagggcatctgcctctcggagcgcagtcgcctcgccgtcgtccgagagcgaggccgatgccgcgccatctagcaagaagcgtcgaggctcgcacgccgagcggaaaggcgcgactgcgaccgatgggtcagccacgtcaaaggagaagcgtcgacggacgatcgtcccggacgacgtgccctctgagcctctgcaggaagcgaagcccaagatccatcggccaccggcctcgcccttgcccgacatcacctcggtcccgacgcctcctgccacgagtctaccgtcacacatccggccgcacgagacggccattgcctcgtccccggctggcacgcccgtaccgcacaatgctccctcgccgccggtcgccagcaagacgttcaaatcggccggcaaagccaagtcgaaagcaaagcgcaatgcgacgcccaatttcacgagctccgaggacgagccagacgcaaggggcgaggtttcgggcgacgacgcgcacgccgacgttcactcgacctcgacacgctcgccctcaccgccgctccccccgctcgatctgccgacgtcgcgcccagccctacgtgcgcgcttcaaggacctctttggccgctacgaggcgctcaatgcgaggctcgagaaggaacgccaggcaagcgaggacctgctcgccggacggcgccaggagggcgacggcgaagttgaccggccgtgggaggatctcaagcgggatgtgcgacagcgcaatgcttggcatcgggagctcgacgagatcaagcggcggctcgcttagatggccatgatcagtctgcgtgtgggcgacggtggtagagctgtcgtctctgaagttgagatcgagaggagtcgcccaagttggacaacatggagggggcacgggggagggtccccagccgtgacaggatgcagagtggacaagagaaagcacgccgggtcgcaggaggggggcgagcatgaggctgccgacagaggatctggcctcggagcggccgcgaccgctgttgttgagctgaggagaccccgatggaagggggctggacgaaccggcgaggctttaagagtcggcgacactcgtcttctgtggtcgctcgtcggtggcggtggcgacgtcctcggccttcgtctcctccggttgaagcggatcgcttcagcccatgatgaggacctcctcttcgctgagcatctccgctgcagcgtccgatgtcacaaggacgttgttctcgagcggttgcgagagggacttttcgaaggagacggccgagagtcgttcggcagcgagaatcgcctcgaggacctcgtgatcctggggctcatcctcgccagtgacataggcgaggatctccctcggcattggcccaagagctacaggctccgccgagtgctgctcctcctcattcccttcttgctcggtcggtaccgcgaccgcttcgacagcagcctcaacggctccgcgggcctcgagcgctgaggccgccagtgcgccgttttgaacgactttggcaaagagctcaagcatggcccgctcctggccgtcgtccgatgcaggggctggcggcagcatgtcgatcttttcggccggctgctcgtgatactgttgctcgggcaggtactgctcgtctggcgggagagggttttcgaactggctgagattgagcccgcccgagaatggcggatgccgctcctcttcctcgtcatcatgatcgtcgtcctcgagcagaaagggcatgccaaagcgatctcgcggccagccgtcgtcgatgaggccggcgtccgagtcaccatggccgtagaagctcggcgagcgggcctgctcgggcgccctggtcttgcacttcttggccggcgacttcttccgcgccgttgtcgtcgtctttgccgccttgcgccgcttgcctttgcggcgtgaggctggaaaggcatcctcgttgtcctcctccggctctgaaggaaatccctcgtcgtccgacgggtcctcatctggcgccgaggacgacgacgacgacgaggcggcctgctgctccggccgggcatcgtactcgtcgtctgtgataccgatgccgtcctgggtgtggcccttgccgatatcggtgtcaaggccagagacggatgaggctgcgcgctgcttgccctttgagccggcgggcagccgagcaaagatctcctgcggcgacgggactcgtcgcgtcgtcgatgacattgctttcgactgcgacggagacgacaggcggcgatttcccttgatcggcgagcggccagggccgggcggcagcttctgaacgctcatcgtgacctgtgtgcatcgggagaagcgtctcagcccgtgcaagaggagggagcaatgcagcatgacgcacgcggtacttgctgctggacccaggccccacattctttgtcgccctccagccgcctaagaacatggcaagggtcgagctgtcagcctcggtcgctgcgggcggcgaataagtcagagagcgggacgagcctccgtccatctcgccgtcccaagcaaactcgcccgaggtgatgatgaggccgagttcctccgagccgtcgctgaagtcgacaaaggagcggatcgtcggtctcttgccagcacggggcgctggcgctgacttgggtctcgacggcggcggaggacgagacgctgcgggtttgggcgctggctgcggcggcggtagagccggcctgaccgagacggccgcctgctgaggcttgctcgaggatgcagcgcttgtcaggaaggccggctggtgacctggcggccgccgggcgacgccgagaatcgaggtggacgacgacgtcgccgagtcgacgggcgttagctcggtcgagctgtcgaagggcgatgcggctgggagctttgacgaggtgccgagcgacgtgcgcttgcgctgcgacaaagcagaggagaggcagcgcaggtcagctagagccggtacatggcctcgcctgccatcaaccaggagacggaccttcagtggcggcggcctgctttcggtcgaccggcctggaagggagctcgtgcttcgcgccggcgacggctcgagatgctcggccgggtagacgtagctctcgttctgctggagccgccacgacggcttgacgacgcgaccgctcttggtccgaggttcggccatggctcggttcgcaggcagcgagagggaagcggacgggtggttgttcaaaggcagaggaagcagcgatctcgtcggcgcgtcgtgaggcgctcggagtcaggtcggcagtggttggcgcagcaggtcgaccgaccggtcgtcgcgtcgtctcgagtcaagggagtgcgggagggaaggcattatgcaaagggggagagagggagaggccacggatgtagaagggtgtgcgtgacaagggaagcaaaagggaagtttcggtcgaggatcgtaagctgggcgtgttttgaggcaactagggctacagcagtttcgggcagggagagagaggaaggcgcgccaggagaagagacgaggcgccgggtggacgagcgtaagaggaactcgattgggggatgggccggacacacatgggagcgtgtgccgggaaggaccggggatgctgcagctcagaacaaagggagggctccgcaaagggcgagcagagtcgtgccggcaacggcgaggaggccggccgctagcgggctcgccacgctcagatgagccgcgctcgagccagtctggagggaggggtcagtcgggcgagcgacgcgcgtgagaatgattggcgcagtgatagtctgcgagcgagcgagcgagcgagaaaccgtcagccggccgcaaatgtgagccatcagtgaacgggcgcgaacgcacctcgacgacaacgattccagccccgtcggtcgtcgtccgctccgagacgaagtcggtcgtgatggcgcccgtctcgccgctgccagggtcgacaaagacggtgacgatgtcgatcccggccgagcctgacgggctggaagggtagatcgggatgacgaccgtctccagccctgcggccgtgttgacaaacgtcgagccgcccgacgtgaggtactgggtaaaggtgatgatttcgatgccagtcgcgcctgccgggagcgtcgtcgtctgcgagtcggcggcggctgacgggttggactgctggccggtcggcagagcagtcacaatgacgacctttgtcgtcgggtcgagcggcgtctgcgacgacgcgggcgtcgcaggtgccgaagtcgttgtcggcggcgtctgggaaatctgactgtcggacgcgatgggcgcagacgacgaggcgacggcggcagacgaagtggcggcgggcgcagacaagggtgcggtaatcaaagcaaacgagccagaattaatgccggacaagagggaggatgattccagaggtgcggatgaggcgagcggagtggaagaaggcgcaggtgtgatgtcagacgcagagctggaaagcagagcaagcggtcagggacggcggctgcgagcgcggcgaatggcctgcgagctccgtcgggcaccgagagaaaaacaagttggcagagagacgcacgctgggcttgtcgtcgtcactggcgcggcggaggacgtcggcggcggtgcggcagacgacggttcaacgctcgtcgtcacggccggtgccgagctggtcggctcggccggctcgctggtcgtctcgggctggacacttgtcgtctctggtgccgcactcgttgtcgttggggccgttgtctgtgacgtcggctctggctgagcaaacgagacgatctcttcggcagtcgagctcggcgccgcagcagacgtgctttgtgcaggcggctccgccgacgtcgtcgtgggctcgggctcggtcgaggagattgctgggtccgaagatgtgctcgtggctggctcagccgacagagaagccgacggggcggccgaggacgctctgcgaggaagaggaaccggggagatcagcgtcggtttttgccgagagatccctggtggcgacaagggcgcccgggacgacccaaacccgactcacagctctgccgacgatactaggaggatcggaggcggcgaagagtcacactgtcagtctcatgctgctcatcgcagctcatttaatagcactcctcgcacctgctgggaccgccgtcgtcgtcccgttgctgccagactcctgacggcgccagatccgagcagcgtcctcgtgctcggcggcccggacgagctcgcgaaggccggcgccggcccggagctcgagaccgtcaaactcgacgggtcgagcggtgacgagcaagggagcgagcagggaaaagaagaaggccggactgatcatcttgctaaactgggtggggtgggtggtcgagggagaaagaggagggaaggagcgcttgcgaccgtgggtgcaaaggacggtcagcggcgcggtcgaatgtagtgctcgtcctggcaacgccgcgacaacaggcggattgacgagagatcagatacggactctgggacgtctcgggtatgctgctggtgcgagagaggagacctgaagacaatcaaagtgggggggtgacaggcccgggcgtggaagacggaggacggtcggtcggctgcgcgcttcttctcttggctgggctgcggtggggctcgagcagtgagggaaccgaggttgcggacgggcggcgttcgcggcaggtcgacggtcggaggccgagcgctactttcggaggatgaggtcgacacaaagtagtctagcgtgtcctcgagtgagggccgagcagtcgtccgtcagatgagattgggcaaggcgcgtcgttcggcggcaggcgcaaaggagaggcacgtcgttttttacgcggcggcgagcggagcatccttccggcgtgcaagactcgcagccagcaccacttgcaaaatggcagcctgtccgagtcgctgttcgcggcaggccgaatgcgtgagatctcatctattcgggacgtgcagcagctgggagcgagggctcagagggcgagcaacttcgtgagcttctcaaaggcctcctcgatgacctgatccggctcctggtcgatgctgacgacaatgacgtccttctcgccctcctttggcggctcctcgagggtcgcgagctgcgagttgagcatctgcagagcgcgagggtttgggtaaaggaggtagggaggatgagggtcgatcagtccgggtgtcgttggttgcagcggcagacgagggagcttagagcggacacacgtcctccttcatgtagtggccgctccgggtcttcattcgcgctgagaggacgtccttcgtgccgtggaggtagacaaagatcggccggacgtcgtccttctttgcgttgccgggcaggccctcgggcaggcactcgagcgcatccgaagagatacctgagggcggaggacaagtgcgaacgtaagcacttcacgtcgttcggatgagcagcagcattagagttggccgagctggctcaccctgcccgcgctggatgtcgcggtagaccttcttgaggcaggaggctgcgacgacacagcccgaagggtggatagcaatctgctcgacggcgtgcgagaacagcgactggagctgcagggatcaaagcgcaaagcacaagagagagcggttcgagtcagcgtattgggtgcctggcagcctgctgcgcgcggcgagggcgtcacatgccttggggagactgacccaaggcacgcggtcagcatcctggagcgggatgccgttgcccatcttcttaatgttctccttcgagtggagcgtgtcgccgtcgacgtaggggatcccgaacttctgggcgaggccggtgccgacggttgacttgccgctgcgaggagagtatgcaggcgaggcgctgcgtcagcccgcgttcgggtcttccccatctcttcccttgccgtcgatatcaagacgcaccagccgcagacgccctaaagacgagaaggcagaggagtcagctgccgggcatgcacacgaccggtcgagcgcaggcgaaggcgagcacgcaccataacgtaaatgatgaccggcttggtcgacagccgggtcactgcagaccgcacaagcaggaggcagaacgtcagtcatgactggggttgagcgttatgaaggcgagctggcctggcggagagctcgctcgcttcttgacggagttccctcggctccgccacgccgaagcctggtcgagctcggccaggctcctccctccctcctcctcccgacctgcccccttacgagctctgtcccggcatgcctcggcgagagcgcgaacgtacctggcttgccgctctgaatagcggcctccttctcaagaacggcgctgccggcgcctttgccggtgccgacggcgtcgtgcgtcgcagacgagaagaagagggcagccgtgccgagaaagaggctgagcgtaaaggtcgaggcaatatccgacataactgagcgagagcgattcagaagggcagagggagctaagagcagaggatgaggtcgagagaggcagttgatggatgacggtcaagaggagacagaggacgagagggcccgcggtttggcgttgccggcggcgcgcgatggcaacgaaccgccggccggcagtcggcccgcacctccagcgtcgagagccaaacgaaacggcggccgacactcattcttccgcgccggaacgcttggatacaagagagggggtgcatgcgatggcggagcagagggagagcactaagggatacaagaataagagggggcggtgcgacctgcggctgatgcaggtcagccggcgagtagcgcccgggccagacgacgacgcttaggtgtgcttctcgccccgatcggccttctgttgtgagagaagtaatcggagcagcctggtcagcccccgcgcgacgagtcgggacggcgcaggaaggttgacgtacgacagcgtcttccgacgtggtcgggttgaccgtcttggtgccggcggccttgcccttttcggcgccgccctcatggtggtgggccttagtctgctcgactgtgggcaatgggggagccgtcagtgctgagggcaggaggagcgcaatgaggcgcgatcgggcgcaccagttttctcctgaagcttctcgatcgacgggatctcggcctggtcggccttgacgctggcctcggagtcactgcggaggtgggcaaggacgggaatggcggcggcgtcagcgggatggccttattgggcagaccgggccagcatcggacgcacgaggcgagacgctcgttccagcccggggccgtgtccttgtgaggggccgacgagtcctgctcgcccttgaggttgcgagccttctcgtgctggaggacctcggggtcgttgtcgtgccggctcgatgcggagaggcgactggggaagggaaagaagagcacagcccgctctgaatcagcaaggctaggtttcgagccactccaaaggttcccgtcgcagcgtcgacagatggacgtacggggttgacgagatgggccgggcgagcgagagccggacggcggcgcgcgacgacgaggcagagcggatggcgacgaacatgacgagctgagtgagagttgctggaggagaggaggtgagctggaaggggagttggtgatagtcgagagagaaggcgatggccaaagcaaagggcggcaggccgattcgtccgaagccgggcgtcgctccgaaccgcctctatgacgaccgaccgacccctggccctttatttaattttcgaacctctaattcctccgtcgatgctacggcgttcgacgggcgacgggtgcaggctgcatcgaggctgtccagccgggcgagcgagcgagcgagcgaggggaggaactgatcgagagtgaagagggcaggcagcgctcctggtcaagtcgcaagttcatggtcgaagcaatccctccccccctctagacggcgatgtccatccggacgaagttgttgtaaacgctgcccttcttcaggagcgtgtcccacttgcctcccgggacgtcggcaagcttggggtgaataaaaccgccgtagggcgcgtggaactcaaggaaggcagcgactgcggcaggagagttaggcaggaatgtcagtgccgcccttgagcatgagcaggggttggcggggcgcgacgcacactcgctcgagtactcctctgcgacagccttgtccttccggtgcgcgagcttcttctgggtgccgcccccgccgccgggggccgtgtagagctggacgccggcctggttcgtcgaccactcgagccggaggccagactggtcggacgacagcgacgcgaccggcttgaggtcggccgaggggctaaagcggattggaaggtcagcaacgttcgcatcctgcgctcatggcagcgacgcacgtcgacgtgatgaacgggctcgcaaagtcggcctttgaaccagccttgagcagactggcgtcaaatgtcgtcggctgcgaggggacgtcgttgagctcgtcaaagaggtaaaagtcgtcgtagccgatctcggggtagcgctcgccgatcggcttgccggaccggtggtcgtgcgccaagccgtcgggcgaggccgtcaacgagccagtcggcaacgacgtcctggggtcgagcgtgaggatgttggacgactggagggggaccagcgggccgtcagtgactgattctgggccaaggagagccttcgagctcacgactgaccttcagcatcaagttctgatcccggacctggtctccgccctcggaagccgtcaggttgaagccccagtgctgcgagacgtgtccgggtggagtcagtcgctgttcacgtcagggtccgttttcgtcgctcggacgttccgcacctgcgtcaggttgataggcgtctcgggcgtgtcgtcgagcagcttggcccggtagaagattgcaatgcctcttgacaattgctcgggcccgagcagcgtgaagaggacctcgacctgaagcttgcctgggtagccgccgtcgccgtcctccgaaacgagcgtaaagagctggctctggtcggcgagctgggacgagatggtctgcttctctgcgggcgtgaacagggtcgcggacgagatgtcgctcggcgtccagtcctgccgacgccgacagattagcgcgctgaacgatgagggatgggaggctcaagagggaggacgcacgcgctgatcgaaggcctcgggcccgccgtggagcgagacgccaggcgtcgacggcggaaacgtctgcgggtggaccttcgtcccagacgggaggataacctcctcggcaggcagccggttaacgtagcggccgactacaagcagcaaggtcagatgacggtcgtttcagcccaagacagggcccggcttcgacctccgacgacgagctcgcgcaccgatgcagtgtaggaagccccgtttctcaatctcgagcttttcgggcgtcgtgatgatatcggccgtcttgccgtccttgccctgcgagacgaggatccgatggatgtgcactgcggccggacaagggagagcaagatgggagggaggcgaggcgacaagtcagtcgttgcggcggaggaagccgacggagcgcgcgcgacgcacggcccttattggcaagctcgagcgtcagggagccgtctgggaggctaagaatggtcgtcatggtgaaaggtaggcgtgagggcgggagtgagggtgaggatgagggagaagagagcggaggccgagtcgagatggtcagggcttcggagggagcaggagggcgcgcagtcgaccgccgaggttggcccgctcagcgattcgggcattggagcgacggccatcaggcaggcgctaggaggctaggaacctcggtcctgtctcatagcgacaatgtacttgcgagaaagagagagagagagaggcaataggtagcaacagcggccatggccacggacgcgaatcgccctagcctctgccgacggccatcccaacaaatgcagacccatccgacagcccggccctcccccccgcaaacccggcgcgccagacgatcgatagattgtagcagcatcaagaggcagtggtctccgactcccgcgctctctcctctctctctcgtcgtctggtggtggggtcaacttggcgattctgtctctgcaaggagagaggagaagtaggttgacgatggtcagctaagtatcaacggtcgacatctgggcccagggacactcactaaacgacagttccgctgttggaagcgatacggggccagaggtcggcggcctccttggcgacggggccggtgatggccgagcccttcatctcacccttggggttgacgatgacgccagcgttgtcctcgaagtagaggaagacgccgtcacgccggcgccagggcttgcgctgccggatgatgaccgcaggcatgaccttcttgcggagctcgggcttacccttcttgaccgaggccatgaccatgtcgccctggaaaacacgcacgagacgtcagcgacctgcgagacagaggcacagagaacgtggtcatgctcacggcggcggcggcaggaagccggttgagacgggcaccgaagccgataaccgagatgacctgcgagtgcgggaaggcagagcgcagaggtcagcccagttgctcacaggcaagcacgcgcgctgctcgcccgacgcacgtagaggttcttggcccccgagttgtcagcgcagttcatgaccgctccgacgggcagaccgagggtcatgcggaacttgtttccggcggcttgggctgaacagggtggcgagagcacggcgtcagcgcccgtcctggagcgagcgagctggcgaaggcgcaggcggcggctgagttgaaggggaggtcggcggctggggtccgtgggagcagcatgaccctgggtaccccggcggcgacacgcggcgagctaggaggggtccaggccatccgaagcggacaaccctggagcgtcccgctaatcgccctgctccgtcgtgcttctccagagcgacgagcgaccaaaggaggaccgcccccttggtctcccttgtccctccgcgcgtgggctgaccctccctccgagcccaacccagcagccccgctctagcgccgcggacgcgcccccctcccgcctgcgcgatgccagcctgtgtttaggaggtgggaagtgctactgacgcttggacatctgggaggagcgaagtcgaggtcgatggcggcaggtccaagggcggtcggcgcgagattggtgcagcggcgcaggtgcagcaagcgagcggcgagaagcacgaccgagagcggggggagacaggggtagcgatcagcacgcctcctcaacctgcatgccgctctcctgtcgcggaggtgcgtgcgccatgtgccgtaccttgaagacttgacgggggagtgtgggtgcctaaggggggagcagtcaggtcgggctccggagcgaggggcgggacggacgctgcgcgcgcgagtcggccggcccgtaatttgggtagctcaacacccaaactgggacgggccaaagacgtttgcttagggtcggttgggcaccggaagagcactcacaagagacagcgggtcggcaagaaagcgtgcaaggacaaggcccgacggccgcggatacaggtcacggaggagcgtcctttgccaccctcttgcctcgccctgacagccttgcgctcgagctcaaggacggtcgcggcgccagtctcctcgagtcgcaggctcgaaagttttgcaccggccctggccttgcgcgcacagcgggacgactctcgactaagcacttcgacaactgacatcgctcatgtcgaccgacactgtcgttgcacgagctgctgaccgatatctggcatgcacgaccgtgtgctcgacctgacctttgaacacactggctggccggttacgcagcagggacaaacgacgaccgtctccgcctgtccgacagtcctcgtcaaccttcatccgcgtcactcccgtcttcgcgcgatgtagcggccgtccatcggcgagcggcgagctcctgctttggccagcgaacggcggcggcgggcatgtcaaggggagacggacttacctgctcgctttgaaacggatgctctgggcttactcgtccgtcaattgaggagtcacctgcgctctcccttgtcgccgcggggaaggggggggggtgcacttcttgcgctctcgctgctggcgacggctgatcactcgtctgacccgtttctcagcgctagaggacgctgtcttcgctcagggcagcctgggcctcaaaggacggcccagccggtgccagaggcatccgcagaattcccgctgctcctcaagaggcgttccgtcgagtcacctccggcatggcactgccctcccagtctattcccttcgtcgactccgtgccctccgttatcgacagccactgctcttaccggcgcgacgcgggcccgaggctcgccgtccccctcccctcctctcccgtcccgcgccaggcagacgctcgccggcctcgcgcccgacgcactcactgaactgaccgctctccacggcacgcgcgtgcgagccgagcaggacgctcgcctcgcctcacctcgcctggttagtcaggacgaggcccgtccgtcgcgtcttctcgggtcggtcttgtctcagagacgaggccctcctgcaagcgcactcgatctacaccttgcggagtcctgtcgtcggccaacaatctctgtcctcatcgtcgtcgccggcagcctgatccttcgacggccggaacattcgaccgacgcccgcctgggtatcgaacgatcctctctcgtcagtctgtcgctgtcggtccctcgtcgctcgtcctacacccacgcacgctcagacatattgtgtcgtgtcgtgtcgtgtcgtccggcctcgcctcgagtgctcgagacggaaagcggcatggtcgagccggccagatagggtccgtcgtctctgatttaccgggctcttgtcagagagggcgatcgtcgaggagacgacggacgggtagaacgaaggggacgacgagtgctcgtccggtcggtcggtcagtcggtcggtcggctcgacctgacgagccggccttcgggcccgttccccaacaagcctctccgttccctccctcccttccttcccgcgaggctacgaacgtcgcgcaactcgaagacgggcacatcgacgagccgaccggctcgccacctcctcctctccccgcccgtgcctcgtcagacgcgaccggccgccctccaaccgcccctcaggccgacagtcgaagttcagccgtgcaatcgacccactttcctctctctctgactgtgtggagaagagcagcagcaaggaagacccatacaagaagaagctgcgggcagagagaaaggggggagaggaggggggagccccttttcccccttggaggtgggccggccgaccgggcagggctagcggcggagagagttagacaaagggttaggccgagggcggacgattgaaaagccgaggtcgggtcggtcagtcgtcgccgtcgcgccgagcgacccgcaaggccaccagtgtcttccacctcatcacgacgcccctccgcctacgccatgagctcgctcacgcactcccacccgccctcgcccctctccttccacagactgaccttccccccccgtccctcatcgctcatccgcccaaacagggtctcaagaaagagctgcccggggccgagggcgtgcccgtccacgagcgcacgcaggtctactggaagccgcaggagggctagaagaggccagaggcaggcggaatgaaggggaatggggcgagagctcgactcgagcaagtagtcgggcgggtatacaaatcgacgcttccttgaactcaattttccgcgctcgggggcggtatgttcgagagggtttgcgaggtctgacgactgagatcgatttcgcataacaggccattccagagtcaggctatgaagcaaaatgccgcgacttggcccttagaagaaatcgttctcgagcaggtcgtcgtaggccgagtagatggtcgctgaaaaggcgccgagggcggggaggtcggcgaggctctgtcgtcggtcggagggaggacggttgaggcaaaagggaaaggtgggggagttgtcagcgcgtcggccgaccaccttgactttgccagagggagggccaaaactcacgtcgacaatgtcgttccggccgagcccgccctggtcggccgtcagacagtcgcgcccccacctgctgacctcgacgaggatctcggccagccgcttccccttccccctcggctgctctccccctccgccgccgctgtcgccgccggcaagcaccgcgtccgagccgacgacgacctctccgcccagcaggcccttgagcagcagatgctcggccagcgcgctaaacgcacacgcgagcgacccatcgagcgcgatgccgaagtcaaccgaagcaattgcggccgtcgtctcggcgaggagcgcgcggaggggcgagttggaagggatcgaggttgaatagggcgggctgaggtggagcgaggtgaggagctgggcttcttgcgctggcgtcgaggggagcatgtgtggcaagaagctgggttcgacagagtcggaaggaccaggtgagctcagttgccctgtgcgatcaggtcgggcagagacgacgcagggtacgcacgagtgcggacgtgggatgccgtcgccgccgaggtcccactcgaccttccgccggacctcagacaggagtgtctcgaggtcggtctggtcgataaacttcttgaggctcactctgtgcgaaggagaagggggggcggggggcggtagcacggtcagctgccgatctctccttctcgcagcgcgaaccgaggacgcacgggccaaagacctcgtcgaccgcgagcgcgacgcgctccttaagctcgcgccagccgacattcatcagccaccagctgaaggtgaggtacgccatctcggtctcctggtcgatttcgtcctcgagcccgccgcgcgccttgggcgactcctcggccgctgcctggacgccgaccgcgccggcaaggtacgaccaccaggccgagacggtcgaatcgccgctggctgcgatagacgtcgggtggaaagactgctcaagctcgcgtaccgagcgtatgtacgaataacggccgagaatgttgagctggacccgggtgtgcaggctgaggattacaatggtatagatcgtcgtcagtgagcgcgtgaacgctggcagagtgcgaggagtatggctgtcagcgacccgaccctctcgacacggaagcaaaacggacgagcgcactcatgagcttgagctcgttccacagctgcatcttggtcttagtcggcttctctggcgccggagccgactcgtccgctgagggcgccggcgactcgacggtgacggtggccgcagcggcgggtggcggcagcggcgcctgctcgggcgtcgcctcaggaagctcgggatgagcgacctgctcggggctcgatgctgactcggacggctccgagacgaggtagccagacgtctcggattggagcgactgcgtcgagctgtccatctggaatggcaaacccggaggtgggatggtcaggctcgggccatcgactagaggagccctctctgtcgacgcacctcaacgctgctcactggcacttgttcacgcttcttaaactcttcggtccagctctcgtggctcgagttatgcaacggcgcaggcacgtgctgctgctgttgcggctcgccttccgcagcgtcccgctcgtcgtccgccttgccgctgaccgactcgggcgtgctgctctcgtcagccttgctcgcatcgctcccgaccgagctgttggcgagcgagacgatcgagtcgccgaggttaaccttctccgagggtcgcagcgtcgacgggctctggcgcgagagctgctggagctcgtgcgtcaggcgctcaacgtcaagctcagtcaggatctcggccgacaatgttggcaggagggcgagcagtgtaaaggtgcagtcctcctgattctggacaaaccgccggcgcaagctgcaagaaaggggggcgatatcagcgctcgatctctctgtcgccctctgacagatggtgactggaggagaccgacctctcacgggcccgacgctcgtcggccgccttgtcctgcatgtcgcggactcgctcgaccgcatactggccggcgaggtagaggccacctgcgacgccgacggtgatcgcaacggtcttcgagtgctgccggagacgccgcttggtcgagtcgagcatcttgcgagaaggtgatggttcgggggcgagaaggaccggggaccgggcacgagctttgccgtctctggccccccccgacgacggcgacgacgacgacagcatcagcagaagccttggctggaccgtctcctcattgcacccaacggaatggcctcagacctcggaccgaacggcttgccgctaaccctgctcgtgctggtggggcttgtcgggtgcggtaaggtgcgagcccctctcctgaccccgctgagctcggtcgcccctttgtcgctcacgccctctttccttgccaacagtcaacacttgcccacgagctcgaggctcagctcggctggttgcgctgcaaccaggatgacatgcatggcgatcgccgactcgtcgaggccaaggtggccgagggtcttgcccagggccggtgcgtctcgctcgctttcccggatcgtcgccccgtcgtcccctgacacctagctcttactttcctcggcaggtcgtgcgtcgtggatcggacaaactttgacagctcgcagcgggcgcactggctcagactagcagcagcctcgggcaggccgatcaggaagctctgcctcttccgtgcgtctactggctacccgccaacattgcactgtcggatcgcgctgaccccatcccatctgatctgccccttgcagtcgacattccgaaagccgcctgccgtgagcgcttggcgacgcgtgtcggtcacccgacgataaagacgcccgaggttgcgttcgaggttctcgaccgcttctcccatcagctgcgggcgccgagcgcaagcgaaggctttgaccgcgttctccgcgtcgattgcaatccgacgctcgaccgaaccggcctcgagggtctggtcgctcggatcgagcgcgagggcgacgtctttgacccgcggacgatgatcggcggccggcaaggcacgctcgacagctttgtcgaccgacaggcggtgccgcagcagactggcggcggctggcgagctccttcgggctgggctgcggccggccaaggccagacgctcggaggaggacgaggacctggtcggcagggttagacgccggcaggtccatcaggcgtcctgaacgagcttccagtactggtcggacggcggcggcgcgttagagacgctgctggctacatgtctcaccccttgctccgaggtcctgcgcgcagggagaagagcagcctcagcatgtgtcgccgctcagagtacgctcgtcttgagcgagagacccggattataaaatactgcagctcgatcgatcgcctttggacgggtcctttcctgccagctcttgttgaggagggcgcgcagaagtcatgacggcggggtctgtcttgagaaacgcctcttgctagccggctgttcctcccccttcctcctgccagccacgcacgcccgcccaccttttgccgagagcgaagacggatcggtccgctctctctctccctctgcttgcccaaacccacctccccgctcggatggtctccccgtcggtgcgtcctggtcgtcgacgtcgtcagcgcgcgtcgctcccctcggcgccggccgacagccccgttcctccgaggctgatctcgcctctctgccgtctctcagtcccccgtgtcgccctcgggctcgttcggcagcacggcccgccggccctcgacggcgacggtccgcggcggcggcgccaacaacacgacgccaaagggcggccaggcgagcaacggcaacccctttgacgcgctgcaggagctcgagacgatccccgacttctctgtgcgtcgcgcctcccctcgccttgctgacccaggctgcgtcaagctgacgccagaggaactctcacaccaggacctcggtctgctgccatacctcgcgggcgtctcgcatccagccttcattctcccatcaccaagggtaggtcattgcgcgacccaccgtgtctcgtcgcgcgcgctgacggcctgggccctcaccgcttcctagctctcttcgtcgtccaagccctcgctgctcgccgtctggacgaacgatgcagcggccgaactcggtcaggatctctcggcgatcctcccaatccgcgatagcgagcgcattaaagcactgattgccagccaggaccagctcgacgaggaacagtgggcaaccgaccaggcggccgacaagggtgagacgacctcgctcgcctcgttctcgtcgctcgaccgaacactgctcaacgtgatcgacgtcgagatctcgctgccgcgctggagcaagcgccggccataccaggcgacactccagccgtcggctcacccgagcttcttcgtcctcttcctcgccccgcgcgcgccggtccgctaccggccccggccgtttggcaacgacgctcgctcgcaagctgactcggtcgacggctcggatcaacatgccagcccgagcgtcggctttggagggattccgatgtcagaggtcacagaaggccccgaggcgttcgagctgccggccgggtcggctaccgacgcactcatcccggacgagctcaaggagaaggtcgagtggacgtcgctgcgtgaccagggtccgaacaagggcccgattgatgctggcgagtaccgatggagtcagaccgaggcgcacgcagcgatcgactgggccaagacacccatcggcctggtgagtcgctcttccgccttctcatcgagtactacaagacgctgactgcaaatgccgtacagccgaaacattggccgccgacgctgacgacactgctcaagacgtccgagatgctgccaggtgcgatcggcgcgcttgcgcaagttcctagaagagctcagcctgaccggcccccgtttcctctcagatatgactgccatctggtggtacctcggcgacaagattgacgactggctcatcgtccacaactcggcctacgaggagcggctgcgcaatccgagtggcccgcagtacggccggctgacgtccgacgcctgggctggcgaacactggccgacgctcaagcgccgggcccaccactgcatgaacacaggcaagggcgtccacgtcgacgacgacgccttctttgtccgctctgttgaaacctactggagctggcgctggtcacccatgttcggcccgaaaggcgagaagcgtgcgtctttcgactgctcagttctggcgatgcaacctcagaactgacgctctcttcctcttcattccagtcggcatctttgtgacctgccttgtcgacacagaaaaagtcctcgcccggcggtacctcgagacgtcgcgcatgctcggccaaagcctcatgacgtcgaggacgccgaccgagatgaccgaggcgctgctcaaagcactcgagctcaacgagcgcgactttccttgggcgtgctggtatagcttgaagacggaaacggcgaccggccagaggtgtgatcgtatgtagcccgctctctctctctcatctcgccgcccgcccgcccgcggacactaatctctcaccctgacccgtgctgacagtcacttcggagggtacaatcaacctcgccggtactgtaggcctgccgttcgaccacccagtgtgtccgcggcaggctatcctcgacctcacatcttcgcccatgctggcctcggcgactcatcagtggccgctggctgctgccgtgcagaaagctttccactcggacagcccagtgtacctgcccgacttggtcgtcgacattcccaactcgcagcgcgcctggggcgacgtgccctactcggccctcgtcctcaaggtttcgaacatcgacgagccgagcgggcgcgtcagcttcctcatcgtcggcatgaatccccgccggccatttgacgagcagtactcggacttcctgaaggacgtgagtgcgcctcgagcgcgtagctgagacgtgtcgcgctgagctgccgcccttcccgcctgcggaaaaccagattcaaggcgcgctgctgctcacgtcgcgcaacatcagcttcatggaggatgagaagcggaagagaagccagctcgcgtccctcgaccgggccaagagtatgttctcgtctcgactgctcgctctccgacaagaagtgcgttgacctttgcctttcaaccgcgctctttgcagccgccttcttcgcctcctgctcgcatgagctccgaacgccgctgcaggtgagtctctcctcgtatctgcaggtgatgcgtagtgctgacccgtttgcgccgtactttagctcattgtcggcccgctgaccgacctggaggggaccgagacgtcgacgagccgcaaatccatgttctcgctcatccagcgcaacgccaaccggcttcagcggctcgtcgagtcgatcctcgacttcagcaagattgagagcggccagtttcatggccgcttcacgccaactcggctgggtgcgtattcgagcgaggtagccgaagtcttccggtcctcgatcgaaaaggccaagctctcgtacaaggtcgagacggtgggcgacgccgagcgcctcctctacgtcgaccacagcgcgtgggagaaggtgagccactttcgcctggccatcgccgtcaacctcgtttttccctcccttgcccatctcgactgaccacttctccgcgtccagctcgcgtacaatcttatcggcaacgcattcaaatacaccctgaagggaaccatcaccatctccagcatctaccacccgaccgagtttgaattcaaggtgaccggtacgggccccctcttcttctctgcctctcccctcttcccggcgactgacggcccttggtttctcgacctgcgccagacaccggcgtcggcattcccaagagcgagatttcgcacgttaccgagcgtttccaccgcgtgcagtcggtcagccgttcattcgaggggaccggcatcggccttgcgctctgtgccgagctcgtccaagtccttggcggtcggctcgagatcgagtcgagcaccgcggccgagagcccgaccggcgagtcgggctcgaccttttccgtcttcctcaagtacggccgcggtcacctgcccgagggcatggtcgacgagagcgacggcgccgacaccggcacctttatctgctcgacctactcgaagggcctgattgaagaggccggccgctggacaatggccgctggcagcagcgtcggcggcagcatccgcaccggaggcagcaccggtgctcggtcgacgacgacgcagtccgactcgggcgtcagcacctccgattcgtccaaggtcgacctgacgacgctgttctgggagaagagcaatgtcatcctgctcgtcgacgactcggccgacatgctccagtacctgtacggcgtcctctcggcccactgccaggtcttaacggcggccgacggcaacgctgcgctcaggatcatcgaacggcagcgcgtcgatctcgtcgtctctgacatccagatgccgacgctcgacggctatggcctgctcgccggcatccgagctcaacaagatcctgaccgagccatcacgcccgtcatcctcatctcggctcgcgccggcgaggaggagcgggtcggcgccctgctcgcgagcgccgacgacgtcctgccaaagcccttctcagccaaggagctcatcgcccgttgccatctccagatgcagatgggcaagaagcgcctcgaactcgagcgcaacttccgctacgagtcggccacgaccaagctgctgtccgacttgtcgcccgtcggcatcagccgctggcggaccgacgggaccatcacctacgccaacgacagctggtatcagcagtcgggccacccgcgcgacaagccgctgtctgagtggatggacagtatccacccagaccacaagcaagtgctcggccagatgtacgccgacctttttgagggccggcagcaggtcacgggcgagtggctctggacctctggccgatggtcctactgccaggccgtcatcgtctcttcgcacgagaacgacaactacaacgggacgatttgcgtcctgaccgacatcaccgagcgtaagcgctacgacgccgagcgcaagctcgcggtcgaggccgaggaggcccaccttcgacagcgagctgaggcggctgagcagcgcaagcgcgaggctgacgaacagaagcggcaccaagagttcctcgtctcagtcgtctcgcacgaggtccggaaccctgtctcagcgatccttcagtgcgctggtctctgccgctcgaacctcgccttcttcaagaacgagctccacgaggccctcaccagctcgacgccgtttcaaccgacgtcggagctcgtcaacctgctcgaagaggacatcgaagcgctcgacaacgtcaccgagacggccctgctgatcgagcggatcgccaatgacttcctctcgctcggcaagattcagctcgcgacgctcgacatctttgcgacgccgtgcgacctctcggccgaggtcaggaagctcctcggcgtttttgcgagcgaggcccggctcaagggcatccgcatctcgctcgacctccgcggtcagctcggcgagcccgacggccaccacgtctttctcacagaccctgtccggctcgggcaggtggtcatcaacctgctctccaacgcgatccgcttcacgagcgcgtccgagcagcgcgagattacggtcgccctcgaggtctcggcctcgccgccggccgacgactcgtgcctcccaccgccgtcgtccgtcgctttccagccgggacagaccgcctacatctatggttcgtcgagcaggttgccgcttctccgtgacctcagggctgaccctttgtcgactctatcaggcgccgtcaccgactctggtcccggcctcgctcctgaagagctgtcaaacctgttcctgcgtttctcgcaggccaactcgtcgacgcataccgtctttggcggcagcggcgtacgttcctcgtgctcgtcatccccccccgctctgcgacccgtttggctgatcactatccctcgaccgcagctcggcctttacgtctgccggctgatcaccggcctgatgggcggcaagatcgaggtcgacagcgtcaagggcgctggcagcacattccgcttctttatcgcgacccagacgccggacgacaagggcgacatcggcaagattgtcgaggtcaagcccatcctcatcgagttccctcacgtgctcgtcgtcgaaggtgcatcccagcctcgagctcctctgcggccatgagtgaccttgctgacactgcgacattgccagacaacatgatcaattcgcgcgtcattcaacgacagctcaagaaggccggcatgacgtgcgagacggcatttgacggccagcagggcctcgacgcggtcgtcaagtcgttccaggccggccagcggcggttcaactgcgttctcgtgcgtctctcctgcttgccctttgcccatggtcgtgacccttacctgaccgccgtcggctacagatggactgcgagatgcccgtcatgtcgggcccgcaggccgtgcaggagatccgccggctcgaggcggctggcacgcttcccagccggtcgaccatctttgccctgaccggcaacgcccgccaaggccagatcgacgacgccatggaggccgggatggacgacgtcatcatcaagccctaccgaatcgaccagctccttgtgcgtccccctcttttcagacgaccgctcaaaagaagctgttagagcagggctgacagcaaccttcgctgctgaccaacctctgtaggagaaattgaggacccagagtgaagtcatctaattgcatcgtccaagtccctctgctgctacgcaccccccttgcacctctcacgcctccgctcctgtagacttcgctttgactcgctccgctttgtatcacgtagatctttttctccatcttggtctctctacattcccatctcactgtcccgatcttcatctttctcgcaaagctctagtcatacaaattcaggcggatgtgctcgcgagagctcagtcaaccagggcactcgtgctcgcccttgccccagcgtcaggctcctcgtcaccagcgacactatcgaggccgagaccagacctcggagctggctcgctccggcgtcggccgcttgctcctgcgtccagactgccgtgacgcgagtgaccaccggctggacgaccgccgacgacgaagaagcccggcgacgctgcgccgaggccgattgaaaagaggccggtggacgtcgggtgctgctgctgctcggcctgcacggcctgttgatcgtggcctgtccggtgcgaggaggcggtcggagacggcggcgggagcgtcggcgagaacggcatatagcgggcgtgcgagtggacagtcgacgagcgccgaggtggctggtagccctgcggcagcgtgtggatgttgggcagacttggccgggctcgatcgctcggcagcgtaggagacggaggcgagcgcggcgccgaggccggcatcgaggccgggtcgtcgacgtacggctcatcaaagtagctcccttcgctcgtcggctcctcctcttcctcctcctcgacccagacgccgactccaacgccaccgcctccgcagcccttgtcgtcaccggagcaaccgcccatcgacacggcgccgacgccgaggaggaggacgccgacgccgacgccgacgagtccgagcttgaggccagtcagctgcgagagctggtcaaagtaaacgaggccgccaaagacgctcgagcagttgtacgacgcaaaggccgtcgggcagacaatcgtcggcgactggagccgaagcgcgtggttcaggtacgcgagctgggcgagcgcgaggatgatcaagccgccgcccccaaagacgacagtgccgaccgagaactgcgacttgcgcgacgacagggtcgagaggaggagctcgacgcccgtcttggcaaagatgaggcagagaccagagagcgtgccgctgacaaaggcataagccagcgcgaggtagagccttgtgcgtgcgtcccggtcgcgggcctttatcgacgccgactcggccggcgcggccgcctgggccgaggcaggaagctttgtgagcggtgtcgatggtgtgtactcttcctcagtcggcaggtggattgagccttgggccggcgaccgtcgctcgagcaggtactcgaccgtgtggcactgacgcagaggaaaggctaggacgcgtcagtcgcccgagcgccgaaggccgccgagagcggaaatgaacgtacgatcaagagagcgatggcgacgccgcccccgacgagcgagctaaagagccaccactcgcggcgtgcaaacaggcggaggagctcggccagttcgagcaggggctcctcgacgacgccaaaggtcgcgattaggacggcgccggtcgtgatgaggacggtgccgatgcccatccagcgggtgaaaacgtcgccaagcagaaacttggcaaaaagactgttgtacagcagcgagactgctcccagcggagcaaggacgacgagcggcagggcgccaacctgaagccagccgagaaggcgggaggtaagggggtcagcgagcctgtcctgacggcgatcagccagcaaatcgaggttcaactcacctggaagatggtgccgaggacgttggagctgatgaagatggtgaagccgagaagccagagcgtccgcttgtgggcgggcctctggctgacgagcggctgggcggccgtcagaatgtgcgacttgcgctggagggcgaggccgagcgactggacgagcgaggccagcaggccaatgccgacgccgagccagagcgggatgccctttgaatctggcattgagctacggccttcgcgcggatgtcgatccggtcggcgtccggtgcgataagagagatggggcgatggttgcaggaggaggggagcaggaggcgagtgtctctcgcgccgagttcagagggcgtgaggttgcgcgcagcgccagtgcaagaaggctgcctcttcagccctcgcctcattctcagtagaaggtctattcgagaagagagaggatgaccatatgtagcgactcatagcggcaggctgccgagagggtcggaaggcgaggccggtcagtcggggcggcgcgctgcgctctgcccggcggcatcgaccgacgcccgtcgagagccgagctctcccttcgacgggctgacgaccatctcactccttcttctctttcgccgaattaaagagctgcggccaggctccttcactcccggactagactcgtacccggcgcatcgctcatctgccctcgatgaaaacaaagcacgcgcggcagctcggcgctttgccgaccctgctcctcctcgccgctgtcttcctcccgctcgtcaaggtcatctcgcactaccactaccgcctgccggaggcgctggtcgaagggtgcgtctactcgactgctacgtctcaccctaccggtgctgatgatgcttgaacgcaacacagacgactgggctgacgaccgtcccttctcctcagcacctcatcctccggtgtccctcagttctctgaggctctcgcccgctcccacgttcaggcccttgaggagacgggcttccggatcgtcggcacgctcgagcacgccgccgggcgcgactatgtcctcaccgaggtccgcaagctcgctgccgtttgcgcctcgaccggcgtgctcgagtgcgaggttgagctccagcggggggatggggctcatcgcttttcgatcctcgaccacgacgtgctcaagacgtactcgggcttgacgaacgtcctgctccggatctcggacggctcggctgaggcgaaggcaaacacgctcatgctcaactcgcacatcgactcgcagctgccgggcccgggcgctgccgacgacggtgcgcgatgactgagaattgctcgaccagacccctagagctgaccaccttctgcatcgcagcgattggcgtcggcatcatgctcgaggtcgcacgtgtcctgatcgaccgcaagcagccgatcaagaactcgatcctctttcgtaagtcaggccctcggcccttggcaagctatgaaacctcggctgacgatgccttttacgcgaccactaagtcttcaacaatgcgttcgtgttatcctctgttacgctgaacgccggacgctgctgaccgtgttgatcgcattcgcgttgaagggaagagtcgctgcaaggtgagtcgggccggctgcccctttcttttggggtcttcccgctccgatcttgacctttcctctgcctgcctcacagatgcctcgcacctgttctcgacacaagctccctgggccaagtcggtcaaggctttcatcaatctcgaggcggccggcacgaccggcgccgagatgctcttccaggccggcagctcgctcctcatccgggcctacgcaaaggtcccccacccccatgggacggttcttgccgccgacgtcttcagtagcggcatcattggatcggacaccgactttggacagttcgttcagtacttgaaggtgcgtcttcatcgctgctgagccctcgtcttagaacggacgtcgtgtgctgaccccgcacccttctaccttccaatcctcaccacccttcttcaggtcgccggactcgacatggccctcgtcgacaactcctagcacgtccctccacctctctgagtgtgtcttgcctcgtcctgactttccctatcctgcctcagctactaccatactcagagcgacacgctcgccaaccttcaggtcggctcgacccagcactttggcgagaatgtcctagcaatcgtcgacgaacttctcggcgagtcgagcgagctcgcctcgattgacgttagcgaggcgctcgagcaggagtatggtgcggcccttctcattctttgtccgaggcctagctgttgacccactcggtgcaaccctcctgcagtctacttctcgctcctcgacaagtacttctactactacccgctcgagacggcccgtcgggtgcgtgtcatcttcgcgtcagtgcacgcttgtctgcctactgatgctgagcccttaccccgagcagattacgctcggcctcttcgccatcctcgccatcatcgtcctcaaccggtctgagtggcgcgcgttccaggcctactcgcttgctctctttggtgcttttggatcgctcatcggcgccttgctcttcgtcaacctggtcgccctcctcatgtggcagggcctcaaccggccgatgagctggttcggctcggagttgctgcccctcggcctctacggcccagtcgccctgcttggcatgctcgtcccgcagctcgccatcgccgccgccgtctcgccgctcgaccggccgacgctcgagcacgcatccttcacagccggccccgtcctcaccgccggcctcctggctgcggcgaccaagttcgaggtcaagtcgggcttcatgctcgcgctcttggtggcgagcggtctcgccgggatggccgtctcggaggggctcggtatgcttcggaagcgcgctcgtggcgaggtccacctagtgcgcagcggtccttacgcgtactctcgccttcgaaggagctgacgcttttcctgtcctgcgcaggccggctactttgtggcccaggcgatgccgacggtgctcgggaccatcaccgccctcaccgtcctcgccatctttgtcccgctgacgggccgcatgggcgtcgaggtccccgtcgagctcatcatcgccaatctcactggcatcctcgtcgtcctcttcctgccgacggccgtcccgctgttccaccgctttgaccgggccgttcaggtccgcgtcctgcttgtcctcgcggccgcgacggccctgtcggtcgcgctttttgcgggcaaggaggtcttttccgcgacagcgccgcgccgcatgttctttcagcacgagtttaacgttcgtccctcgtgtggggctcctgctccgcgcgagtcgctgaccgggcgctctttccttctcttaggccacctccaacgcgtactcggtccacctcggtacgtcgtccagcctgcgcttgacttgctcccctggctgacagctcaaatgtcgaacccctttagcccagatggacacggcgccgcatgcgcctgcgctctttgaggagatccacgccctcgtcgacccttggcgcgcctcgccacttatccacggcgaccgcgccgagacggccctccctatgtcgtgggacagcttcaacccggtccaggccttctttgatgtctaccggttttcggtcgacccaccggccgagaccggcacgctgccgacgctcacaatcaccacgctcgccgactcgtacgacaaggcgtcggacgtccggaccgtctcggtccgggtcgaccacgtacgtcctggcttccctctgcgcacgtccgccagccttctgacgcgcgccctcgcaccttccaggagggcctcatctggccagtcctcgctttcgacgctgaggtcgtcggctggcccttcaacgccgatgttcccgagggccaccggcggcaccaccttaagggcgtcagcgagctcggcttcgagtcgtacgatctctcgctcgacgtcaagggctcgaagccgatccacctcgagtatgttgcgttcgttagcgacggcatgtggcctgcgacggcgcccactcggggcagtcacctccctggcaccggtcggctcgagcaaatcgctaaccatctcaccagctacaagggcggcgcgattgacggcctcgtcctgagcaccgttgtcggcgtcgtcgaggtgtagctactcggttggcgacggcaccattccctttaccccccaaaagcctaaatccacatccctagacacgcggcgctctcttttatacagctcttgacactctggcttctgatcggacgggcagaacggtcatcatcagtcgcttgcgggcctccgaaacgaaatcaatcgggtttcgagcgcagcttacgcagactccgcctttcgtccgacgaccgtcaccacgcttctcctgcctcaaacctctctcctctcgctggccctgatgctgccgctctctcgtgcgctgcgagctgcggtcccgcgggcttccatcccgtccgcgagccgctgctgcttggcggcggccgcccgtctgcagcttccagtcgccgtcgctgtcggacgcccgttggccgatgtgagcccaaggttactgtcgacctcggcgactggctgggatgtagaggagccagcggaggatgacaggcaaccgcagacgggtctcgggatcaagacggaacgcctgcggtttgagtacctgcctaagaagatgaacgacaagggtacgcgagcggtcgaccatcggcgagctcccttttgagattgagcacgcgctgacctgtcggcgtcgtctcgacgctacacctttgcagacatccgagagctctgtatcgcccatggcgtcgacccggtccgcatagggtcaatcaatgagaagcgcggcgccgccaggctgcgcaaccggcgggtctatgtcgaatgtgcctcgctcgacgatgccgaccgcctgcgagagtcgctcaccaaggcccgcctcgctcagccagagccggcggtcgtgcgctttaagcgcgtcaaggaggccgagccgtcgtacgagctcttcctaaccggcataccgcccgactcaactaagcagagtacgttcctgagacggcgccaggaggaagcgcgaacgggggctgacgacggctgctggctgccctttgcaactccttgcaggccttctcgcagcattcaagtctgtcccaagggtcaactacctcttctcgacgatctttcccgccgacagtccaaggcgctcgtacgccatcatgcatttcgacacggtcgagcaggcgaccgaagtcctcgagactgtccaacgcgacggcggccagacgtatggctttgagggcctcgaggcccgctacggcgagcccaagatcatgcagtcgcttccggtcgagcctacgaccgagctcgtcatccagcgactgccgctgtcgtctgaagaggacgtcgtcacggcaacgctgatagatcttggcgcaaccgccgtcactttcaagcggaacaagacgggcgatcaagccactgcgaccgcgagctttcccgatgtcgccgctgcccttcaagcgaggagcgcactcaacgagattcaggacgcaacgcggcttccgatagtcaacgaagtctggcggacgccgaacgacatgctgccgccggacctggacgccgagaagcctgacaacagaaagaacagacgtcgcttcgatccgatcgaggagtcggcccgcgagccttctagctcgtcgtgggcccgacctccttccgctcgctggctatcgtcatcctacttaggagaccgcgccgacaggcagtacgaccggccagacgaccggcggtcagccgacggctacgccgaccgccctgtcaggcaatggactgatcgcttgactgaccgggacttcgaccggccggaacggccagccggttccttgtacggcttgcggcccgccaactcagggcacagcggccgcttcgctggcggtgagaggtcgactggtgacggctaccggtcgcaacggcggccagacgcgtcgctctacaaccgggaggacggctaccagcggcgagaccggttgcgggcgccatcgtcccacgggccgggcggtcgccagccgttgtcagcgcctcgcgaagggggcgagcgccgcccgcggtttccgcgggactaacgagggagcaaggcctgctctcccggcgagatgcaaaggcttgcacctcgcagcagcaactgcgctcgctcccctcatcggtcgcgcccattgggtcaagccccttcggcatggctcaatcctcctcgtccggtcggctactcgcgcctatccgagcaagcgtctatcacaaatcgtcggccgactctcggcctggcgaacgaacgacggcccggccccgccttcgaactccgacgagcgacggcttcaaggcgacgccgtgaggcgtcctcaaaggcacccaagcagtcgaccccgtgccccagccgtcaatggccttggcacacccctttttctctctcctttgcttcgcactgatccgtacaagtccaagggcaagggggaagcaagagagtgcatgcatgagcgggagagaagcaaagggaggggtcgtgagacgaagagcagacagatagagggaagggaaggcgggcgacgagcagcggttcattgcgcaggcgcgaggagaaagtgtaaggttttggggacggggagataacggattgcagcttgacggtgcggagtccgggggtacaacgggacgaacgagagggagagcgaaaagggggcttggtgaagaaagggtcaagatcggaagactttagatttggttcgttacaacggcctgaagtgagatcacggtggcggcagggagtacagctcgagctttgcaagcatttggaaggggcagaggccctctcgctgagggcttgcctccttgaggggggggggggggggggagtcaggacaacgacgtcaacgcggacgcggtcgttggcccgcgcagccggccggccttagacgctcggtcgcctgaccggtgctccacttgacgactgcccggccgcccgccgctgccgaccgcgaggtgctggtggtgggcgtccgtaccggccgggtgctggctgctgccgccgccgctgctaccgtcctcgtccgtcgggagcgggtcgacctcgcctgcgctcggccggcggatcgctgcttcgccgacgccagcgacggccgagccggccggcggacctggtgtcaacggcgggggcgtgtcggtccggtcgtcgtcgtcgtccgacgcaagcgcctcgtcgttgtacgaggctgaagacgagcctggcgaggccagcgcgacagcatgcgaccgggtgctgttgtcgatcgccattgggctcgtcggagggctcggataggctcctgcagcgtgcaccagcgcggcagcggcggctgaggtcgagaagaccgagtggtcgccgacgacgacgacgggcgccgtcgcggacgtcgttgctggtggagggagcgacagcgtcgggacgaccggcgccgctgggaccgaagtcgagccgccggtcgagaccgggacggtcgagaccgggacgggcatcgtgaaggtgaacggcgttgatggtgtcgcaagcgcgttgggcgctgggctggatggagcggcggccgtgcgcaataaggctgcgggcgagaatgacgactcgagcgtcgtctgcagagcggcgagcaccaacggataagcgccagaaagagcgacataagtaagagtggtggcaagaggaagactgacctcgagcgcgacgacctcctcgccctcgacggtgacggcccactcgaggtagccagcgagctcgcgctccatctggttgagctcggcgaggccaaagagaccctggccgacgacggtccacgacttgttcgagtaggtgtcatcgcagatctggcggaaagagagatgggttgtcagagtctgagcggcttggcaggacggccgcaaaagatggccctgctggcgagcacgggggggacgcacgaccttagaggccatcataaaggccgagatgaagagcctgtggcccgagctgcccttggccgacgggaagcgccgcttgagccggccgaggaggacgagtgcggccgtcgtcacctcgtgcggaagcttcgtccggtggagcgcgtaggcaacaaagttggcgagcggcggccgggcggtcggtgccgttgctgcgggcaacgaggacgacgacgacgctactgctactgctggcgcatgtaatggcgggagattcggacacgagaagagatgcgtgatctgttttgaggtagtgttgcgtttcaagggggcgtttcggcgttgcgtcggcagtacgagggccgagggtcgggcgaggtggggccgacgcgcgagaggggcggacggagccaagagcggcgggaatgggacgacggtcggtggaatggagcaggaggagggatcggatgagcgtcagcatcatcgagcaggcacggaatgtcagtcgagagaggctggcgaaggcgagggcgacgaggtcgacacaaagggcctcttcgttggggaagggtaaggctcggcgtgactggcggcccggcgccggaggacaagcaagacactcgacgtcgtcgtcgtcttgtcctttcttcctttctccccgcagcgagagagtagagagatatggaacgcacgtaggcagctgctgtccggctgacggcctcgtggccgtaccagttgccctcggtcgagctcgacggcttcctcgccgccggggctgctggtgctgtcgcgctcggcccgttggagcgcgccgcggcggcggcggcgctggccgggtgggtgctgttgctcatcgtcgtcatcgtcgtcgaggatggcggaggtggtggcctgcgtgaactactgctgctgctgctgctgctgctgctgctgctgctgctgctgctgggctggacgaccatgtacgatgggagagagggtgatggggggttgacgacgacgacaaggctctcgaggtcggctgggctggccgggaatcgagagagcgcacgcgcgggcgacgccccggaccggttgacccgcgcgcccttacacggccgtccctcgaacccgcatgcttcctcctgcctgcctcttgcctcgtgcaagagagacaagacctcggtgctattgcccgcgccctgctgaccgacggctcgtacctctctgcctgtccgtcctacccctgccagcctcctaccccagcagcaagcagcggcagcagcgcccagccaaaccctccggcctgtctacccacccgcgctactgctcgcgaaaggaagcggacgcatcgctcggttttcccgcccatctgctcccttcgtcttgtccaacacgcccatctattcctccgcgccacctgcgagaaggcgatcgtttgccgtcagtttgcttccctggcctagtgctcgctcgctcctcgaacgcaagagggtgcggacgcaacgcgccgcaagttcttctctcctatgaacccagcctgcctgcccgcccgacaacctcggcccgatgcgagcaagtccgcctgccctggagcgtaaggcacaacccggcgacgactagcgcgagggcgataggatgcgatgacggaggacgtcagagattgtgcgcagcactccgatgcgtcgagactcaacggccgcagttcgagtcgtcgcccgctcgtctcgtcccactcgcacgcagctccctcctccccgtgcagactgcaaaaggtcgagcgacagaccagcgtatccctcgtctgtcaatgtcgctctcgacggccttcgcgacagaagagatgtcggtcggtacgaccggcctacgaccggcccgagagccggacgtcgccctttgcacggcggaccaaccaactctactcgcccgaaagccaccgacgcaaacgcccaatgcgtcgaggaccaaaggcaaagctcgtgctcaagggaccttgacgagccgcctggtccgttcaaggatgggccggacgcgcgcgacctcgacaaaggacgacaatggcttccgacgctggctcgacgagcaaccggcatctgaagcgcagggcagatcaaaggctcatgccgaccgcgcgcgcgccgacagaacaagagtgcaggtcgactgcgtcatgctgctggcgggatgaccgcagagctcagcaggcgattgggtgagaacggccttcgttagagcggcagccgcctgcctttcggctcgtcgaaactgagttgacttgcgcgaggcatgtaggatgtcggctgggccggcagacgtggccgaggcgtcagtcgaggtcactgctagttcgaggctggcggtctgctgggggagccttgcgaggcaagcggcccgcacccgagcaagggtgattgaaagagcgcgagaggccgagctggccgagaatgccagccggcctctgtcggacagagagcgacggcgacccggtgcaagggcaactttgacggacggtcgagtcctacttgaggctcttcttgtgcgacgagtaaaccacctggaccctcaccccaggccgggtcaacctagcccgggtcagctgcggatcgcgctcgatctcgtccttgacgcgagccgcatcgacgacgcttgcaagctcgacaagcgcaaacgggtggggcatgccgctctcgtagtggccccggcggacgaccggcggctgctcgagcctgtagccgagcgcggtatcaacgagggtagcgagcctctctgtcgagaacttgctcggtaggtcggagatccggagctcagtcgggcgagagccggtcggacgagggccagttgctagcggccccgaggcagtcgcgacgtagaccgggtgtcggtcgatgaggatgaagccggctttgccgaccgaggccttgaccgcctcagccgcttcgaccgacggcaagtggaggaaggcgaacagggtcgggacgcccgagtcggcgtgcgagttgcggaagagcttgtaccgctcgccagcgaggtgcggccggagcgcacgctcgacgtcggccgtcggcatgtcgggcttgatgttggtcagccggagacgtgagccgggcccgctattgatccattcgcctgtcgcaggctgctccggaggggaccgcagcttaaggcgcaaggggcgactgacacgcaaattctcggcagacgcagacgcagaggtgtacaagacgcgctggggatcgtcatcgtgaagggccgctggcgatgtgcggcgatgcggtgaggccgctgcggactgatggccagactttgagttgaagagctctgaaaaaggcgcgtcgtcagggggttggtcagtcaaggcggtcagacggccgccagagtcaggcgagtcgcaccgtcagggccagcgcggtttccgatggtcactttgagctgccgatggcccacaggtgggaacgagagcggtgctgctgttgccttggtccggccaggcgacgtctcccctggctgttccaggagagccgaggaccagctggtgtccgggcgtgagctacgaagggtcgttgcttttggaggcagcttgcctgctcctgccgtctgctctgcaccgctccaagacccggcggcatcacgttcggcagcctgtagccggcggagactggcgttgagcgcgaggcgtctcctggacggccttgcgagaggggtcgcgcagctcgacgagaggacggctgagctgcgacctgcggcgaaggacggaccagccgaggggcagagggtcgaccgcccgaggccgagaagggagggtatccggacagtacgctgcagagccatcggcaggggtcagcagagtgattggccgtcgttgaagggaaaggaggacggacggagtttcggcgacgagggaggctggcggtgcttgccgcgcccgcgtcactcatcggaacgctctcagtcgcacgaacgaggtcatcgcgctcgaagtcatatgaccaatcgcacgcgacagacgccggctacttggacggacagccggcctggggctcgaccgtcgaggggatgccggccctccgcgcgaaaggggctgatctcgtcgccccgctgctccctcctccttgtgcacctgctcgcaccctgcgcaccattctagccaatggtttaagtcggttccatcgacgaatgatgggcacatagcatagtgtgcgaagcggccacagtcaagcgataaggctttctcacgtagcaggcgctgctggtctggcccggtatcggtttcgagcagcttctctgctgaccaggctacgatcggcaggcctggtctgcctatcgaccgtgcgaggcgcagagatgcgggtcgctacgggccgagtgagcgaccttccgggggcaagcgatccttgacggtaggactgcaggggtgacccggcgttgcctggctcgaagtggcgccgaatgagaggtagcaagcaaatgactacagcgctcgagtcagccttcgtcgcaagagtgccgtcaccgtcaggagagactacgcacgatgtgactagtctgcttcagaggagaaccatgcccgtctcctcgaattcccagtgaagcccgcgccgctcccggccgaccgtcttgaggacgtcctcgacacagagcgcaaactggcggaacagccgcaaatcctctggcgtcagctgctcctcgtccgaaaacgagttgccgcttcgaaagccacctcttcctcctcgcccgcctctccctcgcccgccgcgcgccccgcccgggccaccgcggccgtcgttggctcccgacgacgggccgacgccgagcagcatctggaggtactgctctttgccaagcgcgcggttcgagcgaccgtgtgggagtgcattgacctttgcaaggagcggcggcagaagcgggttggcgagcagcgcccggagctcgactgacgtcgctggaggagggagggtggagtcaaccctgtgttgatgctgcagacggagagacggagctcaccgatcgcgagcagctcgtcccgcctgagcggcttgggctgatcccggtcgagcgggttccctccgccgtcgccgtcctcaggctctgtcggccagagcaaggacgacagggcgcgcaagggggcctgctcctcggctagcggtttgctcagcgcttcgcttgggccagcctcctcctcctttccagagatctcggtggcaggaacgtcgatgtcgatggccgggttgagagtctcagcaacggcagcctccttgtcgtcatcgtcgtcgtcgtctccagaggtcgggagcccgaccgcagctgactctgctggcggcggaggtggcggtggcaggaccgagcatgactcggctagaggatagagcggcgtacactgctgtcagcggccggcgttcaagagcttgtcgacctcgagccgacacgggggacgcacccttgtgccgcttgtagcaggggacggagcagctgcgcgttggttggcgtcgtcccgtcagccccctggcgcatgacccgactcaagcaagtgtgcacgcactagacgacctggcagctcgagcacttgtacttgaacggctgctcgccgcagatttggcacttcacgaccttgggcggcatgatggggcgctttagatcacccgccagggccgcgaccccggccgccgccgttgaagtccgacatgtcctcagtcgactctttcgtgtttgacttggcgtgcttgccgcctcccgagccaaagccaaacttggagtcgcggccctggcgggtgatctaaagagggcaagcgaggaaggtaaaggggggtcagttgaggagcgaggccttgcagtctggtgtcgaggaagggcggcgcaccttggatccccgaccgccgcgctctgacccgccgcggttcgagatcttgcctggccgcgcagtgatggcctcctcgagcttgacgtcgaagtccccatcgccgccgagcgcaccctcgccgtccttgcgctctgtgagcagcggagaagtacaatcagcagagcgcctgaagggaaggggcagacgaggcgacgcactgcgcttaagcgtcttgagccagtcgtcgagcgccctccgctcgccctcgcgctcctgaatcttggccgtctggaccttcttgccaaacttcttgaggtcgcgctgcttcctcgcgtcctcgctcttcttgatgccggacgactcgtcgagcagccgctgacggatgcgctccatgtgcgcgtccgacttgaccatctcagcgtagtagtcgctcgggcgcgagaagggcatgccctcgaccgcggcgagctggcgcgcggcgttggcggcgtcgagcgcctgcttgtaaaaggcgacctcgcgcgagaggtcgtcggtcgggtcgacgccgtgcatcgggtccttggcggacgacgcgctgacgaccattgtttcggaccaggcgaggccggcgtagggcgcagcgatccgctgacggagagcggtcagggcgttctacgaggcgagagagcgggtgtcagcgtcgggctgaaggacaggcggggctcgtaccgcgcctccctctggcagagcccagccggcaagcggcgtcgatgaccgcgacacacacggccaaaggcgaaggacgagagagaaagactcggctcaccttgttgaagatcgtgaccttctggtacgggacggcatcctcgtcggcctcctcgtcgtcctcgagctcgtcgagcgcaacatcgccctcgtcgtcctcgtcctccatgtcctccatgtcgtcgtcgtcgtcctcgtcttcgtcgctctcctcagcggccgagaggtcggcgagctcggcgagcgggatctcaccgacgtcgtcctccgacagctcctcagcgacgtcgccgtcgaactcgtcgtcgtcgtcgtcgtcgtcgtcctcatcctggtccccgtccgagccgcccatagcgccattgagctcggccagggcgttcttgacaccctcaggtccgagagcctcgagtagcttggccatcgtctcctcggtgataaactcctcgtcgccgtcgtcgtcgtcagagtcggactcgccgccagacgaggacggagcggccggcgcaggcgcaggcttggccgactttttgctggaaggcttgccggcggcggccgcggccttgcgcgacgtctttgctgagggcggggcggtcttcatcctgctgaagagggaagaagggaggagaggaggttgggtgtcgtcgaacagggtgcgacactgcgggccagatttcgactcagcgaagcgaagtgagtcacgccggcgtgtgacttgacgtaactcgtctcgccactgccgccgccttggactcgctcggcatgtctgcgacgacggcgccgcttcctccgaccaccgccctatcttacctccctcgaagcagcaaacgatgagcgccaggacaggcgccagccagtcagtccgcctgctctcgttcatcctctggcaggaaatagctggcagctctgccttgccccttgcctgccgccgactcgacagaaggctgacgatgacgacctcttgccctaccctctcctgccctctcttcctcccaccaaggacccgcaaggtccgccttacggtcgtcgcggccgactcgctcgccaagcgtgacgtctttacgtacgttctgctccttcaatcgacctgctctcagggccaggagacgactagcagcagcagcagcggcagcggcgtgtgcgcgcgggcgggcggggcgccgagcgtccgtcgctctcagacaagcagaaccggccgatggcgtcctctctcgctgcctctctgctgcttgattctgacagctctcgctgacactctttgccatctctcactttgcctctcctgatcctctgccttcgcttcggtctccgttgatggactttgggctcgctttctgctcctcatcggccgtctgcgcccgacctccggatcacaccacttctcccgcgcttccctgccgaccacctcatccgaccgacagccttcccaatccctttgcggtcgtcacgtgcgacggcgcccagacatttacgactcaggtcgtcaagaagacgctgaacccttattggtccgagagcgtcgacctgtgcgttgcctctcctcttgttctgtctgcgccgccgttggtcaggcgactgattgctggacgcacactctacgatgacagcgaggtcaaggactcttcggtcgtctcggttcaggtcggtccctcgcgccactgtctcgcctcctctggaccggaacctgacgccatgcttcacccctgcgcgcgcgtcgacagatctttgatcaccgcaagttcaagaagcgcgaccagggcttcctcggcgtcatcaatgtcaaggtgtcggacgtgctcgacctcgatggcggaggacatggtgcgtcgtcgtcgcttctttgtgcggcgcctccgggtcgtccgatctcgtgcgctgacgacgcctgcctgtacgctgccgacctccctcgtcgtcgcgtgcagagatgctgacgcgcgacctcaagaagtcgaacgacggcttgcccgtccaaggaaagattatcgtctcgctctcgaccaacactgcgacggcggcggctggaagcgctgcgccggctaccagctcgacctcggcgacgcctgctgctgctgctgctccgtcggctgccggtgtcgactctccgttgtcgtcgacggctggcgggtcgagctcgaaccggacgtcgcttagcggtccgagcggagcggcggctgcggccgctctcccagatgctgccgccacgccttcatcgacggccgacggcggcgcctcggcctcatcgtccggtgccgtgccctcttcgggccagacggccgctcagagcgctgcgagcgccggagctcaggccggtggcaaccccgccggcaaccgtaactttgacccgcactcggaccagcacgggccgctgcctggaggctgggagcggcggatggaccatctcggccggcagtactacgtcgaccagtacgttggctctcttgcaacggtctgagaagaaaagcggccgaagcgctgacgaaccttgatcttgcccctgccagcaactcgcgcaccacgacgtggacccggccgacgacagcgagcaccggtgccggctcggctgctgcccaatcggccgccaacgccgcgagcacggctgaggcccttcagcgacacaacaaccgaaccttggccgacgacctgctcggcgctgggcctgcgaccggtgccagtggccccggctcgctgacgccaggcggatttggcgccgcctcgacgccgacgacgatcccgaccggcgccgcgggcgcgcagacgtcaactggctcgggaccgatgccggccggctgggagcagcgctttacgcccgagggccggccgtatttcgtcgatcacaacacgcggacgactacctgggtcgaccctcgacggcagacgcaggtccgcgtgctggctgagggaggccagaaccggacgcagccgacgaccgtcagccagctcggacccttaccgtccggttgggagatgcggctcacctcgaccgctcgcgtctactttgtcgaccacaacacaaagacgacgacgtgggacgacccccggatgccgtcgacgcttgacagcaacgtcccgcagtacaagcgcgacttccggcgcaagctcatctacttccgctcgcagccggccctccggccgatcccgggccagtgccacgtcaaggtctcgcgtgagagcatctttgagggctcgtatgccgagattatgcgccagacgccaaacgatctcaagaagcggctcatgatcaagttcgagggcgaggacggactcggtgcgtccgccccgcgtcgcttgacctgtagccgactctgcgctttggctgatagcttcttctccttgtgcctcgacccagactacggaggcctctcgcgcgagttcttcttcctgctctcgcacgagatgtttaacccgttctactgcctgttcgaatactcggccgtcgacaactacacgcttcagatcaaccccaactcggacgtcaacccggaacaccttaactgtcggtcccccgagcgtcgtctcgcacccctcgcgagcaggagctgacccactcctcctcgctcccgcttgcagacttcaagtttatcggccgcgtcctcggcctcggcatcttccaccggcgcttcctcgacgcctacttcatcgtctcgttctacaagatgatccttaagaagaagattgtccttgacgacctcgagtcggtcgacgccgagctctaccgcggcctccagtggatgctgtgagttgggccctgcgccttgaacctctcagatcggctttcggagaggctgacgctctcgcctgccgccgcagcgacaacgatatcaccgacgtcatcgagaataactttacgactgaggaggagcgctttggtgaaatcatcacgatccccctgatccccggcggcgaggagatcgaggtgacgcaggccaacaagcgcgagtatgtcgaggccatcaccgagtaccggatcgccaagcgcgtcgaagagcagttccaggcattcatgagcggcttcaacgagctcatcccccaggatctcatcaacgtctttgacgagcgcgagctcgagcttctaattggtggcatggccgatatcgacgtcgacgactggaagaagcacaccgactacgtgcgtctgcgccatgctcgagggttccccgccgccatctgctcgtccgctgacgctttgctctgctgctgctactctagcgcggctactcgcccggcgatgaggttgtcggctggttctggaagtgcgtgacggcctggccggccgagaagaagtcgcggctccttcagtttacgaccggcacctcgcggatccccgtcaacggcttcaaggacctccaaggatcggatgggccccggcgcttcacgatcgagaaggcgggcgaggtcggccagctacccaagtctcacacgtgcttcaaccggatcgacctcccgccgtacaagtcgtacgaggcgctcgagcagaagctgacgatcgccgttgaggagacgctcggctttggccaggagtagcgccaccttgacctcctccttcatcccctcttcggccccacgcggcctcgcgttcaacggactctctcgcctatcgccgcctgccttcgatctcagcccgcactctttttccttccaaaccggacggcgtctcgtcgtcggccgcatgtacttccccaccctttagatgtgtttccttcctcgtcgtctcgagaccttgctataatgaccgccttctccctctcgcacgcccccttcctttggctggccgtgccgaagaaagtgggaggacggtcaagcgcaatggcgcgcccgtctggcggatggccaagacaggcacgtccgaggcaccgtctcgacgcgtcgtcgcgtctctccgccgccccctctctccctctgacacctcagcccggccggcctctctcttcttgactgctaacgctcactctctctaccttctctcgctcgctcgccgctggtccggacgagctcccacccacgccttacctcgccctctcagcaccgatggagtcgttccggctctcacgcctctcgcgcctgcccacccacctgacgcagaacgcggccgaacgccagcggcagggtacgctcgcccaggccaccaagaaccgctcaaagctcgccaccttcgtcgacgacgacgccgaccggccagacgacgcagccccgttcgagacggtcgaccttgtcggaccgacggctggtattgcgcccaacggcgacaacggtcttcgctggcgggcccggttcgaccgctggatggtcaacgagggtcggtctcgacagtcctctcccacgcacgagcaacccgtcctgacccccttccgtcgttctcgcaggctcccgcatcctcacgtacgccgtctgggtcctcttgaacctactcgtcctcgcctttggcctcgtccactacagcctgaaggacaacctcgacggcgcccgggcgacctttggagtgtcgttcggtccgtccgtgcgattgctcgctggtctcgtcgcttagcggtgccagaccccgactgacagaccttcctctcgacccggtgcagcggtcgcccgcgcctcggccctcctgctgcacgtcgacgcaattgtcatcctcttgccgatgtgccggtcgttcatctcgctcctccgccggacgccgctcaatgacctcattccgtacgttgggccgtcagttcggctctctcctcctgacccggctgacctaggctatcttgcccgccgcgcagctttgacggggcggctgacttccatcagaaggtcggctggtcgatcgtgctctggtcaatcgtccatacggtcgctcgtctgtcgtcccttcgctcgaccgcaccctagccggccgcgactgacggctttccctcaatctttacagacatggtcaactttgcccgtcttgcctcatcgaactcgacaggccccggcggcttcctccgcgccaactttgcgaccggccccggcctgacgggctgggtcatggctggcgcgctcgggacgatggtctggtatgcgctggagcgcaagcggcgcaggcccaacggcggctacgagcgcttctggtacacgcatcacgtccgatccctctacgtctatcaggccacactgagaccgagctgatcttgttcgcgcccgttcttcggcttagctggtcatcattttctttgcatgctggcagctgcacggcatgtgtgcgtcccagctctcttctcagacgaggtccgatcactcatctgaccgctcgacctcttcctcacacagtctgcatgatcaagcccgaccggccgccctactgctcgtttatgagcattggcgtcttctgggtccgtcacgttctgcacctcgacgaccctgcccgctgaccgactgacgatcggttctcctgcggcgacgactgcagaagttctggttgcccggcggcctgctctacatcggcgagcgcatcctgcgcgaaatccgcggtcggcaccggacctacgtctcaaaggtgcgctgcctgagtatcgcgcggctgggcatctgcctgatttaggcttgcggctcggatcaggtgatcgcccatccgaacggcgtctgcgaggttcagatcaagaaggagcacttcaaggcccgcgcggggcagtacgtcatgctcaactggtgcgcttctaattgcgtagtcaagagtgagcttggtcgactctgctgacgagacgtcacgctctcgcgccagccccgaggtctcctattaccagtaccacccgttcactctgacctctgcgcccgaggaggactacctttctgtccacatccggtgcggccggcttcgggatgcggcggagctgagtcccgcacacgtattgacagccgtcgcgttggcttcagagtcgccggcgactggaccatggcgttcacggccgctctcggctgtgactttgcccaaggccagacgccagagtcagaggcttcctcgaaggtcaagcggcgccagacgacggttgccggacctgccaaggagggtaagctcggcggtggcgagggcgaggtcgtgtcgctgccgctcagcatcaacctgccgcgcgtcatggtcgacgggtccgtctcccgacgctgcttctgtcgatcgagcgctgatggtcgcgctcgttcgtcgccgcaggccgtttggcagcgcatcggaggacttcaacaagttcgagacgatcctgctcgttggcgcgtgagccctttgccgctgtcagtgccctccgctctcagccagctgactccccttgctgtctccgttacttcaagcggcatcggcgtgacgccgtttgcgagcattcttaagtcgatctggtaccgcatggagaagtcagtcttccgtcttcgagccgaggttgctggcctgcttaccaatcttttgcttgatctcttcgcccagttttggcaactcgaagccgacccgactctcgaaggtctactttgtctgggtgcggcccttgttcggtgatcagtgctcgctcgcgcgctcatccacagatccacccccctttgcaggtcatccgcgactttggcatggccgagtggttccagtcgctccttcacgcaatcgagcagcaagactcgctccgtcggatcgaggtcaacatctacctaacggcaaagatcaagaatggtgcgctccgctgtcggctgagcaggggtggatgtcgactgacccctctgctctcgatcaagacgaaatgcacaacatcctcgttcgttcggatttcgaccgcggctcttcagctgctggtctcaactaaagcttgcccccctctctgctgtcgacaggttcaggacgtcggcgccgacagggacgcgatcactgctttggtgcgccctgctgttagtcctcttgcactccgctgacagctgacttctcatgcgtcttcctgcagcgcgcaccgacgcactttggccggccaaactgggaccaggtctaccagggcgtttcggatcagcatcccgacaccgacgtcggcgtcttctacgtgcgtcgccctgtgctaccctcctcgcgccctcgcctgatgttcggcttgcactcggcctcagtgcggccctccgactctgggcacccagctgcacggcatgagcaacaagtacacgcagcctggcggcacgcgcttcttctttggttcgtctctgctttgcttgccgcaaagtcggcgccagctgaaccccgcacctcttccctcgtcaggcaaggagaacttctgaggctggacctcagagaagcccttccatccttccttccttggcggcgtccaaaggcaggctcttcccgtccgcagccctactccttttcacgcccgtctatgcaataatggtcatgacagcattgctctgaaaaatacagttccgtagtgtcgtccagcttagatgagctgggtgatgagcttgccctggatgcccttgccgttaaagagctcctgccagaccttggggatctcctcaaatttggcttccttgatcgtctcggagtccctggtctggatcttgccctcctcgatcgccttgcggagctcgggcacgaccgaaccccatttctccatgtagtcggtctgcgaagcagtagaggagggtcagcaaacattggagccaatgccgctgacgaagagggcggacgcacgacgatgaagccctgaagcgtctgcagtagcagaaaggaaaggggggtcagcggcagctcctcatgcgtgtgcttggaggggaccgaagatctcacgatgcgctgcgagatgacctcgaagctgcgatacaaggacgagtcgtcagcaaattgctttctctgctcagcacaccagaacatcacgcactactggttgaggttgacgaccttgctgtcgttgtaagtcgagatggcgccacaggcgatgatgcggctgaagcggttcatcttgccaaacatctcgttgaggatctcgccgccgacgttgtcaaagtagaggtcgacgccaccctcggtcgccttggcgaggtcgttcttgaacgaggccgacttgtagtcgaggcacacgtcagcgcccagggactcgacaaagcctgtgcggcagagaaatcaggggaagggaaagtggtcagcgatagagtctctatggggtgcgtgagtcgaaacgcacggcacttcttctcgccgccggcgatgccgatgaccttcttgcagccgacaacgttcttggcgagctgaacggcgaccgagccagtcgcgccggccgcagccgagataacgaccgtgttctccttcttgacctggccgacaaagtgcagaccgcagtaggcggtgatgccggtcaggccgaggagcgagagcgcaatcgccggcgactggccctcgatcggcttgacgttgttgaagccctgggccgaggcgacaaaacgctcagaccacgtgtggaagccctgggcccaatcgccggctgcgcggaagatgagcggaaggaggcgtgtcagcgaccaagcttcagagggccgttgcttagccgaaaccagacgtactggcaaacttgtccgacttggactcgaggaccttgccaagtacgccgctcgccatcgaatccttctccttgacgtacgggccgtaagcccgggccgggtcaaggcccttctggatccaagctaggagagagagatggatgatcagctgtagcttactgtaggcaacaagggcgagctcggctgaacgcactgcgctgggcggggtcgttcgagctgaagcaagttgagccggggggaggcgagagaacgacgtcaagatgaagggccaaggcagtgagaggcgtggtcagcgccgagctctcgatgggaagcagcgacagggaaagtcaagtcgcacaggtacttgacctcgacgaggatttcgccgtccttgagctccggcagatccttctcctggagctcaaaggtgtcgtccgtgatctcgctctccggcttcttggcgacgatccaggtcttggaggaggaagcgttcgacatggcagggatgatggagggagtgaggaaggatcgagaggggtgaggttagaggtggtggtcgttgaaggccaaatgcagcggcgaaaggttcggtcagccctccggccggtcgccctctgttgctgatgagctgtcgacgctttcccgatgacggaggcgagagtggaggggctcggcggcccaatctttagccggttagtcggtaaagttcaaacagatgagtcagcagtgcgtaagcgtaacaccgtgctactctactccactctgcgatgagtccttgcgacagagcacttcatcaaagctgcaagagggcagctatacctcaacagccgttgatcggaatgcaccagccttgtcgttcgcgggcaatctcctccgtaccgcctgcgaaacggcgcgaatcgcccttcggcagcgttacccagagtgacgtctgccaaagcgtcgggaaatcgtgctgaagccactcggccgagacgaccacttcgccgtcttttagggtcgcgtaggtgagtcataagcaagagacctgagccaggcgagggcgaggtggatgatcagcaatcagcggcccaaaatgtggcggcaaggcacgggcgaaagcgacgcactgggaggccgtccaagagagactcgccgtcgtcctcgttccaggcgaagctccattcgccaggcttgtggtcgtcaggaggcggaaagatctcggccccgcgccagtagtcgagctcgacgacgccgccctcgctccggatcttgttacgcgtgccgtcggccgtcgtcgacggcaagccggtcgtagcagtgatggttacgcaaggtttgccgatcgggatctgtcagaagtttagagagggtcgagagggtcagtgacagcagttgtgtcaaagggctgcaagcaggacgcacgacagttccggcgcgcacaaaggtggcgatggtctcgagaggcgtcggcgtcgtgacggtcgtgcctgccgcgtgaaaggcgtccgtgtgaaggtcgcggaagccctcatctggcttgcccgaggcagcgcaggacggcaagtagacctggggattaaggatggtcagaatatcaggtagagctggacgagaggagagcagcaccgcaccttgccctcgagcgtccccttccagtagcagccggcgacaaagacacggcgagtgccggcccaaaagtcttggccgtcgagcaattgttcctcgtaaacgtttgggtctcgcttggatgggccccagccggaccacgtcatgggcgcgtggcctcctcggccccctcccacatcagcgcgtagaggtaaggggtctggcagcggtcggtggttcggtcagcagcattcgcagtccttgtcctccgctgagaagcacaatctcgtaacgacggaggattgcgctgcgggcgatcggcagcacctcagagtacatccaaggctcgttgacctcgccgcggccggtcggcgattcgggcgtcggcttgaacgagtggatgcagaaacgcgagcagtagagtgacaactggcaccagcgaatgaagagctcgggcgtcgggagaggtccggcgaagccgccgatgtcgtcgccgtacgagtggaggaaagcgagcgagctgttgcaaccttgtgcgatctgggcgcgcatcgtcttgatagatgttacactgtcgccgctccaagacgagttaatgtgctgcaaggtgccgacattggcgctgcggaagaggacaaatgaccgccggccaggttgctcgcgctcgaggaccatcttggtaacgtggccaaccatctcgcagctgacgaggccaccgcccctgtcgacgctctttgggccgacgcttttcggggcggtaaagtcaactgggaccttccaggcgcattcttgcgagcttgaggtgaccgtgtactcattatcatcgctgcaaggggagggtgcgtcagcgggcagtgttggccgctgcaggagggaaggcaaccgacttccccatgctgtcgacgccgctgtcgatcagcgacttgacaccctgcgcccaccactcgcggccggctttgactctgcttgggccatcgtccaagcgaggtagccggcccagccagctgcgaccgtccgcagtcgcctttgagcaggctgcgccagccgcgcttgacctcgacgcccgactcgccccatgagagaaagatgtcggcgggccctcgagctgggtaaacgacttgagctcgccggttggatcgttcagcgagtggccgaggtcccagacggcagcgccgttgctcggcgtgaagatgccggtcgctagcggaggaggcgcattcgggtctgcgagagttggtaacaggcggccgatcaaagagcagcgaacagagggaaggaagcgctcgttgtttacgtgaatccttgaagcgctggcggacagggtcgagcgggtttggcgagaggagcaggaagtcgagctcctagtagagcggatccatcgcgaaagggttgtagtgcgcgttgttggtcgctcgaagctcccatcttcagtttgcgaggctgattggagccgccttctctccgagacccatagcgacatcctgtagcggttgcttcgagtaccacgacagaccgccctcacgtccgggcgccggcaggacggcgaacggccgaagcgggttgtcggcatggaggttccggccggccggccgcgtcggcgatcgtcagctgcgggcacgacgagtagctgagcttgcccgagacaccgccagggagcttgaaacgaacgaccttggcatccccgttgatctagcgcaaggaggaaggatcaggtcagcctccgaggggatgagggttgcaagggctcgagcgggtcggacctcgagctcgtcgcacgcgcctagggcaggtcggccttgagattgtcctgcaagacgccgtcgcgccccttgcggccgagccggacgcggactatttttgcttcaacgacatcgagcgtgtagatgaagggtggattctgctggccatcgttcgaagggcgctgctcgagcgtgatggccgaggcggacgagctggcgacgtcaaagggcccgagcgagacgagtgcgatctcgtccaggtggaggacggacatggcaaccagttggagatctgcaaaagcaggaagctggttggtcggtctctggagggtggtcgttcgtcagaaggagatagtcggctcggtcgacgggctttctccggaggcggactgcgcggcactgcttttggtgctctctcctcgcgaccttgcccgttcatgctaagcagtcgcataggactgcagctgagcgagagggcgtccatgtagacgtcatagctgtccaaaaattgcataggttgacctttaggcggcctgtcatggaggcataaaggtgttcggttgagacagggacagagctcaaggcagctgcaagacggccggcatgaagagcgtctccggtcgctcaaccaccacgacctctgctgctctctcagtactcatccgacctgcgacggtccattttgctggcagaacgtcttccggcagctgccgagctgacctgcgttattcctgacgatgcggcctccgctcactcttcgccggagcgttgttgcgccgggtccgtgccggccgtctccgactcggttcggttcagacgagggagctagaggccgatgctaccggcgtcccttccttccctctaacctcacccctcgagacgagagacgcaacggtacgtcatcttcctgctccccggccggctgcccgtctcggccgctcctgccagtgtcgtcgcccgtcggagctggccggccggcgtgcctccgtccctccgaacgtcgccgctgacactacccttgcctgttggccctcgtcccgcagatggcctcaacgagcagcaacaccgctgctagtagcctgcgacgggccgagagcttcatgaccgaagcttttaagaaacccggcggcgagattcgacacttggagcgaggtgcgtcagcccgtgtgagctgctgcctccgcctctcttcgcagactgctgatgtcatctcttacgaccaggtgaaaacctttcgacgatgaacgaggtcgacgaggacattgctcgctataccgacgaggacctcgtcatcaaaccggaggaggagcgcaagattcggcgcaagattgccctgcacgtgtgagccgagcgtcgttgcccttgtcgcgaagctcgcagctgactctgatggcgtcgctctcccaatacagactcgtacccatgctgggtgagctggcatgagggccgcttcgcaaaggtgaatctaattaactggtcccggcgctccttctctcgcaggcacctactttgtccagtcgctggacaaggcctcgctgagctgtgcgtcgtcgtgcagacgctgtcgattccctttgcaatattgatctggctgcacttttcagtcgcctccatcatgggaatccgcaacgacgcaaagctcgtcggccagcaatacaggtgtgttgccctcagaccctccttcatgctcagctgactgatctcgctcgtcctccgatctcaattagctggctcacgacgtgcgtctacctagcgatcctcgtctgcgagctgcctcagaactgggcgatccaacgcctaccggtcgcccgctggtactcgacgatgatcatctgctgggtgagcattcaacacctcctttgatgacgctctgctagacgggccgctcaccctcctctgtcgcattcagggcatcaccgtcgccgcttctgcagcggtcagcaacttcaccggcctcgtgatcctgcgcaccctgcttggatcctttgaatgcgtaatccaaccggcgcacatctttctcgtcagcgcttggttcgtcccgtgtcggtcttgtgatctttgccttccgatcgaccgaccggaccgccgcgcttcttcccaggttcaagaagggcgagcaagcaggagcgaccagcctctggtacgcgatgaatgccgttcagacggccgtcggcggcctgcttgcgctggccttcttccagatccagggcgccgccctccggtcgtggcaaatcatgtttctcgtcctgtgcgtcacgtcacaactcctgccgatcaccaaattggctcgctgacgagcatcaccgactcgcagcggcctctgtacgatctgctggggcatctttgtcatgttctggctgcctgactcgcccgttaagtcggcccggcacttcaacgaccgtgagcggacgatcctcgtcgagcgcgtgcgggcgaataacactggcatccaaggccgcaagtggcgctgggacgtgagtcgctgcaagcgttctgctgtagcggccgatcgactgactcccttgctcttactcgccttagcacgtctgcgaagccttgacggacccgcaggtctgggcgctcgtcttgatccagctcgccaacacgatcccgaccggcggcctcggagcctacagcaatatcatcatcactcagaacctcggcttctcggtcctccaggccgatctgctctcggttgcgcagggagcgatccagctctgcgtcctgctcggctcggcctggatcgcaaccaagacgaaccagacgctgctcgtcatggcggccttcagtaggtcccttctttctactgctcgtcgcagcctgcaagctcctcctgacgccttctgctcttctgatgctagctttgcccaacattgcctcggccgtttgctttttgacggtcccaaatgacaaggcccactctgtcggcctacttttggcgttctactgcacaatattcttcaacgcacaagcaccgctctcgttctcgctcctcacacggaacgtcgccggcgggaccaaaaagagcgtcgcaaccgccatgacgttcgcagcttgggcgacaggaaacgcgattggcccgcaggtgcgtcggcctctttctatccgcatctttgactgagcctgaacccctgggtcaccttgccgtaggtcttccaagcgaaggacgctccacgctaccgcaacgcattcatcgggcagctcatctgctattgcttttcaatcggcctcttcttcctcctccgcgtctactaccagcggcagaacattaccaagcgccgcgagctccgggcagctcaacgttccgaggcagggcagacggcggccgttgacgaagataacgacgacgacagcccggtcgaggagacgcacaagaacgctttcaaggactggacggatcgtcgcaatccagaactcctctactcgtactagtgtcgcggcgtgagcctcttttaatagataagcgtcatcagaagctcttgtcagcgtccgatggagacagatgaccaagagaggacgggggagcgaaggtcgaggtggccgctgcgcggtcgaaaaacgcccgagcccaactcgacccccgcttgagcccaagtactctcgtccgcggccctgtcgtcgtcggcaaagagccaccacaggaccgacgacaggacgagccagcaacgccagccgacctcttctcgccctgctgaggcttctcctctcgacctttacgtcctctccgtctggttcggtcgctgtcccgtcagttggatgtcgcgcgatggccggcgctcgctctcggctgacctcctcctccgcttgcgccgtcagctgccagcaccctctccctccggcgttcgatgtcctcgccgccgccttctcctcctcctacggtcccatcagcacctgccccgacctccacagacagcgtcgctgccgagtctcctcaggagcagacttcagctcctgcagcaccaacaccagccgagccggcatcagcatcggcagcggtcgcttcggatcgcactgccggctcgagcaatgcagccgtagcaggccagcaagagccagctgcggccgacagcgcatcgccgacgccttcagcagccgagcctgcgtccaagccgacagagcttggagatgcctcggctgctgctgctccctcgaccgacagcccagctccggccacgaccgcagcggggtccaagcccgccgtgcctggagcgaccgacagcacgcccgcctccgagtcgaccgctgtgccgccgccggcagttctctcgccgacaccgacgcccgctgcctcttcgagtctggcgggcacggtagccgccgctgctagcgctccgtcaccatcgtcactcgctgcgccggcatcggccactccgtcacgagacgcttccccttcatcggccgcatcgtcggcccggctggcggcgacgaagaagtttagcgcgctcaacgtcaacaagaagtttctcgagacggcaatcgcgacggccggcaaggagaacaaggacgtcgacaagatggcggcagccaagggtgcagcggctgcggcacctgcaccagcaccgacaccccatccgccatcgcggctcctgacgacgcgtccgatggcgccgccaagcgcagcaccgcgcccgacggcggcccctccgtcgcagtggggttcgacccggccagctcagggacccggcgcagccggaccgggggcgcggagactgagtggcggcgcaccgtgggcctcaggaggtgcgcgcgatggtgcggacggcccgagttggcgcagcttgcaggtcaactttccgacgacgaaggagtcgcttgaaggtgcgtcccgttattgcgttggcgtcgcaactcggcagatgagctgactctgtgtttcgccctgtcgtcagaccgtgaacgggcggcacagaaggcggctgccaacgctgccgaggccagcaaggctgaggctgaacaccagaaggctatcatccaggagctcgactctttccgcggctcgcatctcgacccgaacgctcaccactgggacgaggttcatcgcgcgcccctctcgtcgcccggcaacgttctccaagctgaccttccgtctcttggtcacagcccgagtcggacgacgacgacttcctgaacgaggtcgtcgactttggtgacggcaaaaagtacaccatctctgcgagcccccaggagccgtcctttgcggccgacattcttgatcagcgcgagaggctgatggcggctgagaacgccaagcacggctctgcgtcaggcgggcggggcgactatgaccgcagccggcctgtgccctcggcgagcaagccgcagttgttcaacgagcggagcaaccggctcgagccgaaagacgctgccggtggcctaccgaagggccggcggatgtcgaacgatcctgcaccagcccgcccggcatcgacggcggctccccagccagccaagccagcctggggcatcgtccgtgacgccaacggcaagatcatcccatctctccctcctagccgggccctgccgccgcatctggccgccgctgccgctctggctgccgctggcatcaagccgaccgccacccctgccgctccggcggctgctgacccgacccctgcagctgccgctgcccggtcctcagccgctccctcgttgcgatctggcggtctcggcagcgttcgtccgagtggtggcctcggcgagaagcggagctcgctctcggcgcctcggggcgcgctcgttgagcctcggggggcactcgcgaagcccacgacctcgccgagacccgctgctgctcagacggtcgcgcctttggctgctgaccggcgcgcatcgcatgacggacctcgccctatggcgcccaccgttccgaaagcggccgcccctgcagctgcagctccggcggccgcgcctgctgtggcagtaccgcctccagtcatcgaagacatcaccgagcttcagaaggacgagatgcacaccgcagccgagcgcgcccggctgaggaggcagaaggaggaggaggagcgcgcagccgctcaagagcgggctcggcagaaggccaaggagctcgaggccaagtttggccccgcgacgtcaaagtcggccgctctgcaggccaagtcggcgccgaaggagatcgcgaaaaagccggccaagactggccctgcgaccgcggccggaggatcagcaccgccgactgggcctcgcgcgggcatcagcatcaagggcgctgccaacgcgccaccactggccaagatccaggtccctggcgtccccgttcctgcgccgagtgctcctcagcagcagcagcagcagcagtctttggcgccgcctctccagccgtccccaccggctcctgcctccggcccggcgtccgttcagccgacgctcgctgcggctcctccgacattggcgcagctgcttgagggccaggaggccggagccgagtcgcaggacgtcgactttgccaaccttggcgacctccttgcggctgagagctcgcccacccctgcagcggtccagccggcagcctcagcaaactcgcgccggccagcggcctcggatttcttcgagtctgcgccgagcagctcgcccagcggacctatcctgccgcctcctgcgcctagcaggtcagagagcgcctggcgccggccgtcggctggtgagaaacagcagaccccggctgccgactcagcttccgcgtcgcccgtccccgcaaagacttcggcacccggcagcccggaacttcagaagagcaagcaacctcagcactctgctgcggtcgaggacgtcatgcagcgcatcaagggcgtcatggtcccttccggtgtgccggccactgttgctgtgcaggctcaagccgccccggcgcaggccgagtcgccgttcacctaccagccgcggccgtcctcgccgtcgccggtctggaagaagtttgccgtcaaactcaacgaggatggccgccagcggtcgccgatcccagccaagcagctcaaagtcgacccgaagcgtgagacgctccgcgcctttgacgccctttcgtggcagccgaccatgtacaagtggctgagcctctcgacgctctcacgcgacgagtggctgtttaccccgccgttccgcaaggtgctgggccgagtcgcgcctaaatcggccccgaccgtctcgcttccaacgcagcgcatctcggacctgcccatcaacccgccgccagagagccccgttttccagcgggcagtcgtcaagctgcctcctgcaccggcgctcgaggtcatccctccgactcctgctcgcggtgcagctgcggccgcagccagccagttctcgcggtcggcgcaggagacgacatggcgccgcgccccgcaggtgagcttgaatgacccgagcgcggccgtcggtggcccgatcaagcctctcgtcgatgccggaaccccctcgaacgtgagctttatgattgacgcgatggcctggcaaatcataatcgctgaccctcgagcccattgtacaggccctcttcgcgacgccgcaaggaccggagacgacgggcgctcccatcatccggctccggacaccgcctggcggcaagtcgagctcagcgcccaagctgccgcagggctcgtctattggcttctaccgcgaccggacgccgtcgatcggcacggcctccgacgagcaaatggcctcgctcgtccgcttcaccgtctcgagcgagctcatggatggcccgggcggcggcgacccagtctacgaggaagatggtccttccttcccctcgctcaaccggccgtcgagcaatgccggcagcgctagcgtcatatcggcgcaagatgaggtgagcagcggcttttggctcgcgcgggaaatggatctcgtcactaacagcgctgcttacttttcctcaggccttcgaggtcaacgcccgcgcgacggcggctgcctcagccctctcgccgccaagtgcggcgacgtcggatgcatggtccaagacgccgatggcctactcgcccgctgaccggccggcactgcctggtctttacggcgctccaccaggcgtgccttcgcacagcccgtgggccgccgcgccgtcgtacgacgtcaacgcgcagtattcgcccaagctcagccatcacagcccgcagtaccagcaggtcggccagcagcagcagcacctccagcagcagcagcagcagcagcagcagcatctcggcaacaatggcctgcgcggccagtacaacccctatgctcagccccagcagcagcagcagcggtttgcttcgccggcccacggctacgcactcccgacttcatcaccacacccttcgaccgtcggcggcgcgtcctacagcggcggcagcacaatgaacggcaacgcgccccgcttccagccgagcaatcagcagcagcagcactcgtcgacccggcctgacccttctgcccggccgttcatcccgggcggcgcccaccaccacccgggcctcaaccggaacggctcgtccgacatgggtggcagcgggccctatggcggcgggccaggctcgtcaccaatcggcggcagcccctactcgcccggcatcaacctgcccggtctcccgcctgccgtccagggcggcgtctgggtgcccatctcgatgccgcgcgatgggggctacggctcgtcgccgtcgctcgcgcctgcggctctgccgacgccgtactacacgccgcagccgtaccagcagcagcagcggtcggcgctgggacagcagcagcagcaaccgcggttccgcaacctgtccgaattttcgacctcgtcgcccgccttcacgccccaacagcagcagcgcggtgcattcggcggcggcggcggcggcagtggtgcaggcggcagcccgttcgaggtccggcctcacgcggcagctaaagcggcggcacagtcggccgccgcagctggtcaggacgaccagcctccggccgcatcgtcgccgtcggcctacttcccctcggtccgggcgccggtctttacgccgagcggcagcggtgccggtaactttggcaagggcgggccgtggtagatggagacgcacagacggtgtcagtcagaggaccttggctgcgagagctagaggtcaaggaacgacggtgacggaagggcccatgagatccagaatgaccctcggccttccatcttctccctcctggcgtaagtaagcgtaaaaaaatcgaccgagacgaaagcgagctcaacgaacttcagtcgacgagctgaatgtacgatcctgggaaggtgccagtctggcctcggccgtcgacggagcccgtccacctgccagggaagaaagtcagtcgattcagagctcctcaaagtagacagccaacaggaacagaccagtcgttggcctcggccgtcttctcgacgaggaggatgacgtcgtctcgcgcgaagctcaggtcgccggcctgcgtccgacgcaacatagaagaggtcagccatggacctcgcgaatcgagacagaagcgcaagaaggagtagaagcgcacctcgactccggcaaagtcaaacagggcgacgcctcggccgacgtagcctttcgtccaaacctcgtcggccgtccagtcgatcccgcttccagccggccggccgaaggctgtcgtcgatccggagggaggagagctctgcttcgctggagatgaggaggacgccgacgacgtcgacggagggaggccagcatcagcactgaggatgttcccgctctgcgtccgcgcgaggccggcccgagcgcgtgacccgagggccgaccagtcctcctctgctcggacgttggcgccggcgccaggctggtcgaccgaagggtcgtcggcaaacaggtcggactccatcttggtgctgcgactggtcccggccactggaacgagaggaggcgcgcctggcaggcctcccgtctcggcgtagtacgtgttgggctgcgtgtgaaagtcggagccgcgcgtcgaggaagaccctttgcgggagccgagctccggtcgggcctgccacggcttgggcttcttgactttggtcgcggcggaaggtgaaaaggccagtgacggcgcggagggagcgtaccggtcggacgaggatggagggtcgttgaagggcgactggtagaaagaggagccgtacggagcgtcgtcctcgatcgagtagcgcccgagcggccggtcgtcgtcgtcgttgccggaggtcgagtagcgctgctggtcgaaccgatcgtcgaacgtgctcctgctattactgccactgtcgagcgcgcctccgccagccgagcgtgcaaagtcgtcctcgagcccgccgagtccgtcgtcctcagccgtcagcgccctccccgccttcgagtcgagatattcgctcggccgccggcttcccgccaggccaggccggctcatgatcccggccgacgtgtacgactcggacgagtgaaagtcgccgccctcgccgagcggcggcggatcgtgtgggttgccggcggcgaacgactttgacgacgcgcgtttgcgggaggtgaatgagacggaggagaagaggcccggtcggggactgccgccgccgttgtcgagtcgaggaggggcgttgttggcgctgccgaccgaggcgcctcggttccggccgagcacgccgccgccgccgccggcagctgcagtcattgagctagcgttcgagcccgagcggtttcgaccgacgacgctggagaaaaggcttgccgaccgactcctcccgccgcccgacctcgtcccgtcaggcgagtctgccccatttcctcctcctcctcctcctcctccgccgctccccatcccggcaaacccataaacgctcctctctcccagtcccgggcttccgagaggcgcaacaggctcaccctcccagcccgtgcccatcccgtcgttcgtcgcgcggtcgtcaacccagtcgcggcccgacggaaggcccgtcgcagaaaggattgagcggacgaggtcgtctgcaaaaggcgggatggggacggtgccagagaggagctgcttggacgagacggctgagccgtaggcgatgcgattggcactgttgcgcaggaaaaccgggacggacaagggagagggcggttcagtgggagcgagagttgccgccaggatactgcagaggaagggacggactcctgccgctcgacaatgacgctcccttcgacgctgacgccgccaaaaaggcccttcgttttggagtacgagtacctgaagccgagagcatcatgtcagcatttaggtcacaaacgaaccgacaagggtgaaggagccaaggagacacacatggcagcgaccttgcccttcgtgttgacggcgcccatcccctcggcgttgcgcccgagcgggccgacggcgaggctcatgtttccgccgaggttgagcgagccggcggccatgaaggaggcgacggcgctctatcggggtccggcagcatggagttggtgcgtcagcgtgtggttgactggaggatggagcgcgtgcggacgcttgcgcgtgcaagggtaggatgtagatgtgcgcaaaaggagtgtagggaagagcggacgtacgcgggagtttaggacaatcagaaagtcggtcacttcggcgccggcttggccgccaaagcctgccatccacagatgataaatggggagtgtcgtcgtcagcttcgagacggcgcggagcgggagacttcagagggcgccgaagggccaaagctgatcggttgagcgacgagctgccttgctcccatttgcacagagacttgagccgactcgtgttgcccttgacttcgcctcctgaaggccaagaggtgccaatgagcaggacgtaccgagcccagcagttccgatcgcgctcggcgccgaccactcgccgttcgggagccgggcaatgacaagcccagagccggcccgggccgagacgaggaagccggcctttgcgacggtaaagatcgcgaagcctttcgcatgctggaggaccaccctcccttaccatgccgacctctcagcagcagcgaccactccgtgtcctcctgacaaagtctgtcccctctcgacgcctgcgttccctcgcgagcagctcaacgctgacgatctcaaccgcaacccgttcctcccagcgacgacggcccgccctcggcggccgagtcgcccatgatcggctcatttgcccgcgccctgcgcgagctcaacggctgggacgtccgggtcgtcgttccctcgtcgcaaaagagctggatcggaggcgcctaccagatcagtggttcgtccggtcgcgagcgagactgcttgcgtcccaagcagcatcggccagctccggcatgctgacgtcccttctggctggcgcagacacgatcaccggctcgtactactatccgaagggtccgaaggacgagggcgagaagactcaggtctcgcggccgctcaaggacggcgagagcgccgagtggatcctgctcgacggcgtgcgtctcgcttcgatcctccctctgccactgggctgacgccctcaccgcccgcccaaacagacgccggcgacctgctcaaacatcggccttcacaacctctacccgggcgagatcgacctcgtcgtcagcgggcccaacaacggccgaaacacctctgccgccttctcgcttgcgtcgggcacgattggcgcgacgctcggctcgaccctcgcgggcgtccggtcgatcgcgctcagctatgcgctctttgaccgcaagttcacgccgaaatcgctggagctcgccaacgtcgtcgcgtgcagagtgctcgctggcttgtgggccgactggggcaaggatggcggcttgacgggtggaaacgttggcctctacacggtgcgccacacgaggccacgtcgtctcgtcaaggggcgcttctactgaacccttcctgaccctcttgcgatcgttcggcaggtcaacgttccgctgcaggaggagaacctcgagcggccaaagtttctcttcacgcgcgtctacaacaactcgtacagctcgctctttcggccgacggccgagctcgagcacgaggcggcggcaaagcggaaggccgctctgcccgatgcgacccggcctgcggccgaggaccgcgacgacgcaacttcgccgagcgaggtagaccggccgctgtctttcaagttcgcgccggtgatggacgggttggtgaacccggacccggcgacgctgccagaggggacagacacctggtgcggtaaccggcattcgagtatcgggtgccagacagatgctgatcacgagacttgctgtcgacagggcgatccaccacggctacattacgatctcaccgctgcgaccttggtcagtctctacctccgggccgcgctccagatcacggtttcgcgcgccagccgctgacgcctctacgcgctcccttcctcagctttgaccaggccggaccggaaggcctccagcttggctcgggcgccggcgccggcaaagctgtcggtgtcgggcgcgagtggctgatcgagatgccgcccccgaacgctgggctctagacggacccctctcttactgtatcgcaatgttggatcgcacatcaagaggttgtcgggtccgtctgcgtgatggcgcaacaccaccagacagggccagacgtttcgaccgtgacgtccttgcctgggacgacgtggttggacgtcgagatttgagtgtcaaacgacgtctcccagtcctctgctcagggtgttcaagattccgattagcactcgagcgtgcgagggccggaaagaagccaggcagagagacgcaccgacgtcccactcaaggccggtcgtcgtgatctgggcggtcgccagcccgaggggcaggatcccgcacgtcgggccgaggatagcgtgatcgatggcgattttgtgcttgccctgtcgacggcggtgctcgtgtcagcagtcggcgcatgaagggtcgagggcggacgagacagaccgtgtcgagacaccaggcgacctcgtcgtcgctgacgacccagacgcgggccctcgtcgtccggagccggtggatgtaggagagcgtgtggaccgtctggtcgagccgacccgtcaagccgccgatgagaacaaggtcaaactgcagcggtagacagagagatggtcagaggaggatgatcccttgacgcgacgctcagcgacgggacgcacctgcacggaccgcgcctgttcgacctctctcagggcggcgacacacttcatcaggtcggtcgagtactgatcgggatcgaagtcgaccttgacaccctgcgagcgtcggcgagcaggagcgttagcaaggtgggtgactgacagaagatggccgatggcggcgcacctcggcctcgtaaaacgccttgacgtctggccgcaacgagtcgagatcgcccttgacgaggtcgggcaggtgactaatggcgtgtgccgagacgggtttcagctcacatcgtctggggctagagaagctgaccgagcagaaagcgcaccttcgccggcgctcatcggtcccgagcgcgtcgtatagccgattcgcgccgccgtcggcgcagtatcgcagggtcgctgtcacagagagcggaccgtcagcggtcgagctgaggagaagaaggacgcatggcagcggtccagacctgagacgcactctgcgaccagatccggagaaagacatcgagccggttgatgggcaggttgaggacgatcatcgctcgctcggaagcagcagcagcaggcagggacgagctgtcgtcttgggctgttaacgagccgccggcggctggcggtgttgagaggaaggctcctgggtcccatctccggacggacgggctgctgatggagctgtccatgagcctatgggtagcgagagaggtacgagggctccaagggaaggcagcttgaggctggacgatgtcgagatgacggaggcgtcggtcggacgagctgcttcacgatatcgctcgagctcagcttagtcttctgcgccgcgcgtgaagcgagtcacactggacgacgcacggcgaccttgtctaagctgaacgagagagactgggagcgagaaaagaagtggacgtcagatgaaagctgagcggaggaggccgtcgacgccctggcgaagtgttcgacggatcgctcggcacttgtacaactgactcgtttgcacgccggacgaaggcactcgaattaacgggcattcccatttctcactctctcctcctcttctttttgagaggggtgcgacagtctctagacgacgacgacgacggcgacggacggacggctacaagctacagggtttacagatcggccctcctcctgctctcgctcagagcgtcatgccgccgacgctccgaagaaactcctgctcagtcacgccactgccgggaatccagcctttggcgactgcctcgttgcggatccgaccggcctgctcctcagccttggacttgctggcctcgtcctcgtcgtcagcgccgtcctcctggccgagggctgacgactggcccgccgcaggcgggagcgaccgcgcccggacgcgctcctcggtcagcggctcgtgcgtgcccgggataaagcccgactcgggcgggtggggcaggtcgttggcgggcgaggtgccgttggcaaagtgccgcttctcctctttggccgcggcaggtggtgcctcggacgagggcgactcgacaagcggtacgccgccgttcgtcgatgtgtggacgagtcccgaaggcgtgccgttcgacgggatgaaagacgccataagtggcctgccgtcggtcgcttccggcttgttggcctttgcctcggcgctctctgtcgcgtcctggaccgtcttgctcggcgacttgaccgcctcgccatcggcgacggccgagacgctcccggtcgcctcgcccttcccccgaccgtcccgccgcttgccgccctccatgccaaggaacagcacccggctctcgttccggtcccagcagatcgggccctggagccggtcgccgtcctcggcgagcttggcgcgctcgacctcgcccagcgctggcgcctcgccgtacgtccaatcgagctcgccgccgtactccttggggatgttggcgaccggcatgtactcctggagctcggccggtgacgacagaatgtggatcttctcgacggttccggggtcaaacctgagaaggaaagggcgtcggctcagtctggacgtgcagtctgcgcgttcatgcggcaagagcgacgtaccacttcttggcccagttgaagacggtcgggaaaaaggacggcgcgccgacgacaaagacgcggtcgatcgtctcggggaagtttgcgctcgcgacctggctcgcgacctagtcggaccatgaaggggaaaggcgtcagcgacaagtccgctactcagtccgcgctcggcacgcgagcacctacctggagatgactccggagtccccagaaccggctgaggccgacgccgccaacgtcgatgatgctgctcgtcccgctgaccggcacctcttcgttcgtccgctcgagcgacgagcagagcgggaggaggaagcggatcaggacaaaggtgatgaccgagatggccgttgacgaggcttcgtcgtctgggatcagcgacgacagcttggacggcgtcagggcagagatcttgtaaacgtctgtgagcggtcggaagaggtagggcagtcagacgaggaagcgccgacgagtgagcgtgagccaaaacggacagatggggacaccgcgctgttgggacgcgatcgagcgagcaggaggatgcgcaggcgacgtcagcagggcggccggcagcatcagcccgggtgcgaccggcagacttaccgagtcccgccggccggtccacatcgggtagacagccctgagcgtctctgtaagaaggcagaagcgggaagaggcttcagtaccgacgcgagtcgtgagcgcatgcgagcgagggaacggaccaaactgctcgacgtcgtaattctcgtacgcctcgtcgacgcccttctcgcgccgccagcggacaaagtcggtgtactgcttggccgcgccgtggacgtcaaacttgcgtgcgcggaggaagcgcctggagcgagcgttgttgggaaggggtcggtcgagtcagcgagatgggtctcgggtgctgggatcccgcgctcgccggggcttgcgcggctcgccgagccttcgatagtggcggcttcggcggccggactgctcgagaggccagagacgggaaggcaaaacaaggacgacgactgacaggagggtgccgtccgggatgtcgcccttgccgtggccatcgccgttggcgtttggcccatccgggtcgtacgtcccgtcctggccgaggacggtctttagctcggcgagcttgtgctcctgctcgtccgtcaggtggcccgggtggcccctccaggggtccctcgacccggctcctccggcagcagcagcatgtgagaggtcgagcgagcccttgcgcgagtcgggcccgccgccgacgactgatggcgcccgggaccagcgcgagaggtttgacttgtgcgagccgatggacgacttgcgcgagaggacggcgccggccgagggcgagcggttgtcggccgtagcagccgtgtctgggttggtggcgaccgaggaccggcgggagaacatgcggcgacgaggactagcagcagtaagaggcgtagtggtctaggtgtgtgtaggcaggcaggagggagatgtggtcgggagggcaggtctctgctgatgacggagcgactcttggccgaggccgctgccgctgcggccgccgtcggccggccctgaccgagctcgcaaggccaggtaagcaggctcggtcagccggcaaaaggctcagcgatgagcgagtattgcctgtcgggctgacatgagtctctgcctctcgcttgggagcggagcgaggtccttgctgtcgaagccctgcctggtcgtcgcagctgctgtctgtctcggccatcgtcgaccgcggcaggcgcatccgcagcagcagcatggcgcagggcggtcggacaaaggggattcaacagctggggattcaacagctaccttggacagcgaccctctcgcctgcagaaagccgtcgaggaccatcaagagcagagcgcatccctcataaagagcatccagcactggcgagccagcgtcggaggtgcgttcgcctggtcggtggtcgcttgccggcctcgcctccagccgtttgaccgacccgcctcctgtctaccctcctcctcctgctcgctcttccgtcaccaggcccaggacaagcagcagcccagcctcgcttgccctcctctatcgaccagcctcttcgtcagctctcctcgccgagcagagcgcgcgaggcacatcgccttctcgcttcacccggctgcccgcgtcgctgcccctgtcagcggccgaccgcttgccctgccttgcctcgctcgctcgcttgctcgctcgcccgccatggcccatgcccggcacgtcaaggcttcgtgggccacctcgatcgacgacgaggatgacggaaacgaactcgagcggtcgtttgccctggccgaggacgacgcggacccgcttcggctcaaggaggcggccgaggacggctcgccattcgacgcggccgcgtttgacgacagcgacgacgacgacagtctccctgccgattttaccgagccgccttcgaagcgacgagctgatcagcccgcgaggactcggcctgagcggatggctgctggcggggatgaggacgacgacgggagcgacggggagctcgactggggcgggacgatccgagcgtcgatcgtcgtcggccggccgggtacggcgctcaagccgtcctccagcacagacttcacggccatgcgcaccttcactaccgcacacgacgcgcgctccttcgctgcgagcgagaacctccgccggccggacgcggagccgtgcgtcgtcgacggccgtcggccctccgttgggtctcctgaaggccaagatgacgacgacgacgacctcgtcctgccctctgctctttctcggctctcacttcaaccgctccgcccccggccgtccgctctctccttcatattcagccccgacccggccggcgaggcagtcgacgacgacgacgactggccggccgtcgcccgcgctccgccgtcgtcgacgtgctcgaacgcgccgagcctcgtccgggacgggacgggctccgaagccgagccgtcgtcgtccgacatcgattttgacctcctcgagccggatgacgacagtagcggacgggcccgcggccgcgaccgcgacgacgacgacgacggagaggacggtctggccggcctcatcctgcccgacccactcctcttcgcccgcgcaaacgcctcagcctaccttcgctcgctgcttgaagcgaagtccaagggcagtgcccccagcggcgacgacggccggtcagcgaccgacacggtccggatcgcaagcggcctcgactcgtcgtttgcccggtcggcgagcgacgatgcgttcgaggcggacctcgtcctcgacgacgacaacaatgaggacgacggcgacgagggcggcgggaggaaggcctcccggctgctctcaaccgcgagacttaagacggtcaaggctcgctcgttgacggccgctgcgcgcgcacggacgcttccggccctgccgccaggcggtccacggccgaaaccggtcgctctaacgcgcagcggatctctcgcggcgacggccagctcggcgcggacaaagtcaaccaacgacgaagaatggacgcgcgagctcgaaaggggttggaggagaccaaagagcccgctcccgccgccggcgctggcaccgcagccgacgtcgtccgttgcgagtctcggcaagggccggccgtcaacgcaggcgcggtcaatggcgccggtgctcgttccgcaagtcgatgctcatgcgtcagggtcagcggccgcgacgacgactaccccgctccggcgccagaggtcccaagcccgactcgacgagtcttcgctgcctttctcaaccgcctcgaacgacaactcacccgctctcgttcagccggtgcagcaggcgcgcttctacccaggctcatacgcccagggcctactcgcgcgcaagtcgtcgctcccgctcctttcgcttggcgggagctcagcgccggcgaacgacgacgtccgggccggctcaccctcgggcagcggcttcgcaagccagcatcaacggcgcttcgcagcaccgacagcgtcgagtctcgctcggatacgcgagcggccgtcgcccggcggcgagcgagggtcgatcatcaaccccgacatcttcgcgccgccctcttcgacgacgccggccggctcgcgctcagcgacgcctcagctcacgttcagcccgagttccgccttgggcttgacatctcttgggccaggctcgaggttgacgatgccgacctcttctacccggctcaagttgcgcccggccgtctcgcacgctgcttttggctcgacctcgtcgacctcctcgtcggcacactcattcacgccgcctgcgccagtcaggccgctcgtccggccgcagatcctccggacgattccgcgcagtgtgcgcaagtacagcgacgggaccgagctcgatgcgcttgaggacctcgccgtcgacgtcgagaaggaacggctctttcacgtgccggcgaagaagtctagcggctcgcgcttggcaggtccgtctgtcgctctctgagcgagttcgcgaggtgcaatgctgaccacccgattcattcgcgtcgcagacctcaagtcaggctacggctcttcgatctcgtctgcctcgttgccgatcgctcctcgcgtccgcgttaacagcaccctcaccgccagcaccgcctcaaccgagctcaagcgcaagaaaagccccgtaacgggccccgtaacggccgaaggcggtacgcagcgcagtacgcggagagggccgccgccgacgctcaaggtcatccgcaacctcggcggcgctgacaaggcccgaggtgcgtctttcgccctctgaccgacgcagcccgtcgtctctgactcttgtgtgcttgtacagtcgagggcaagatgcgctacaacccagcgacgtttcgctgggaaggcaacgaggccatcctccaggcctttgagccgactccgccaccggctcgcccggcgctcatcacccaactcaccagcacctcgatcccttctctggccggcgccgtcgaccggcagcccggctcgcccatcgccatcgcgagcccggccatcggcgctcgcgtcgtcggccatatgcagttcgaccctgtgcggatgtgctgggtctcgctactcgccaaagacgaggaagagccagacccctttgccggcatggacgacgacgacgatgccgatgacgaccagtcggccgtcgttgccggctactcgcgcccaagtcggtcgagacgcgacccatcctgcccggggcgattcgacgacagcgacgacctggagctcaagccggccgctggcgctgccctcccgcccgtcaacctcgccgaattcatccgccgcggtccggccgagtacgacctcgcgcgccgcagtcggcacgccgaggagggccatcgggctgacgtcgcccagtgggcgctcgggacggctctctcagcccacggcggcgctcgctcgggcggcgagaaggattgcggccacctttgggagatccgcaaagtcgccttgcgggccgggaagaacgagcttggccctaagccggcgacggcggttaaggccgggccaagcggctccttcacacgcatctcatagataaaaggggtccagctgtcgacgacctcttcacatcacgacccgaacgtttctttcctcgcgcccaatccagctgccctccgacacgcaccctgttgtctccgtcctttgcaccctctcgcaaacccctcactctcacgcgccacgacccctctctcttgctgctcacacgacctttcctgttctagtggcctctgtcgagcatgcggcagcggcgcagaagacattatggcgagcagacagacagaggaggcaaacagacaggtgcaaggagcgagattgaggcaagcgagagacgattcagggtgcagaacggtgcgagagagcgaaaaataaggggcggggggggggagggctgatggaaatagtgcgtggaggttctggagcaatccgattagagaagcagagcaccggcgccggcgagcagacctgctgcgacaaaggcgaagggagtgagggggcggctctcggcggcgccgttgaagggagtgtaggaggtcggtctggccgaggctgaagaagaaccggcaggggtggcgccggtcccgccgccggtcaggtcggcaccgttcgggccgatcgggcgcgatacgtcgttggcctggccgttgggaagacatgtgccggcgatggggtcccagaaggcggtcgaacagttggacgggaggcggaagcggagggcgttgttcttgacctgcacctgcggaggcaccggctgggacggcgagggaaagtcggacgggcaaccttcaaggggcaagaggtaggcgtcatcagcaagcgaacgttcaaggcagagggcggcaaaggagtgcagacggaccgtagcaggtactgaaggggtactcggggaacgggcactgcagaaggaggccgtccatgtgaccggacatgccattgcagattcgaacgtcgtcggcgagctggggcgccgagcacgagagggcctcgctctggtcgagctgcgagatcgattttgggtccatgacccactcgagcagctgctcgaccgagacgatccagacattcggctgctgctgggcccagtcgagaaaggcgttgaccacctggatcttgtcgaggcttaatgggtgccgcaagaaggtgtcagagccagagcactgcggaaagggtgcgtaaacggcggcttacgggtccgtcaggccagggtagcctgtcgcgaggtggatgggatgggtccagagaccaaaaggctggcgcttgccgttgtagtggctcaggaaggtgtctttgagaaaattgaggaccgtctcgggctcgtcgtcaagccaaggatccatgaggtgaatgtccccattgcgaccgaaagatgctgagagaggaacctcccacaagccttcgatcttgggttcgccgtagcctgacgtcgaataaaggactcgggtcagatcggctccggccagcaaatagaggctgccatcactcacagaagccgtccttggagcagtcgttggcgaggccgtcctggagcgtgtatggccagaacgcgttgctggcgctgtcgttcgcaggcatgctcgacgaggcactcgagtcgtacaggaagccggccgacttgaggtctcgaagcgtctggctgtaaatcagtcacaacgaaagtcagtgccgttgcgagactgacaatgaggcgcacgagaggacagacgcagtgtagttgaggtagggcgctcggaagcctcgaatgtcgttgagcgggatgccagagagcgagttgagggcgagaatgttgccgttgatctgaagaggcagggtcagtcatcagcaggcaggtgattttctagcgcactgcgaacggtcgcacctcgggcgcggttgcctgggcgacgtgcgtcatactgtgcgagtgcagaccggacttgtaagtgggccggtcagagggggaggaaacgggagctggaaggtagacttgcgtgtggtccgcaatctgcaaagagccagctcagcatgtcagcccgtgacatgagagctccgaaaaaaagtaaggcagacgacgcacctcattgcccttcatgtaccactcggtgacctgcgagtagttctgaacgggccggcgcacgcatgaggtcagggcgctactttgggaggcagtcagaccgagaagattgcgcacagtataagcgagcgacgtgaagtaggtcatcgcgatgctgcagttgtttgggttgcgccgctgagcgagcagctgtcgaatgagaggcgcaaggatcagtgttggtgccgtcacgcgtcgacccgtgcgggcagactgaccgagtcgaccgccttggtcgtgtacgtctggatcgcatcgtctgcagtaaagacgagaaacatcggcgtctcctcctacaggagcgccggggtgaaagggaacaaatggtcagcacgacgtcgtcgggcgcgcagcggctgctcgcgtgtcgtcgggcgtcgtcacggaccagcttgagcccgcctggggcatcggtgctggcctacagacagaaggaagaggtcgtcagtacaaggacggcaactcttacaggtgatgtaataatacgcacgcagcgacaggttgggagcttgcaactcgttgggtcgcactggtacgcggcgatggcggcggccgatccgccatcgttgcggttgaggctgctgccgctgccctcctcgcgcttaccgaaacggtgcggctcgggcgcacaagcaagaatggccggcaaggcagcaaggagggtgagaaggacgacgaggccggcaggtgcgttgacggtggaggtggccctcatgaggtggcggtcgggagctggccggagttcgagtgtgaaaggcgatcgcgaagggggtcctcggtgaggtcgatcgagagcaaagaggatacgagcaaggagctgcagggggaatgggagcaaagaaagaggagacggagctgcagacgacagcagctcggctgaagagctgggctgaagggagcctgtgacagacgtcgggtgggcgctccgcaaagggggcgtcgtggcacgggaccggaaccgcaccggctcgggccaaggcttggtctcagctcggtcgattcggcttgctcttggctcatcatcgtccggacgctaccccctgatccgctccaagagtgtcctgctaggcgctgctgggtcaacaggcgggttggcgaggagggggcagggtcgttggcgtacgagcagtcaactctccagcgcagcagctggttggcagcgcgtcgcacgagccgtcatcgtcagtctgaccggggccttgtgtgcgagccgccgggcggtgaagcctaactcggcctatgtactgcgagtaaagcgaggtttgaggatgagcgggacgccttttcgaggatcgagtggagaacagcttggacgagagtagtcgatatcttcggagccgggcggggtgcgttggccacgtggcgagcctcttttttccagaccaaatacgccgcgtggtctctccgccgtccggctcatgagtgcaggagagccgtcatgaagcgtcgagagtcaccgacctgctggcaaagcgccgtccggcattgcctgaacgacaggctgagcaatggatcgcttttcgatcgtcgtacaggtggtttctcgagacaaccgcccaaggcccgtgcgagcgacgtcggccgcgcctgttgcggcagcacccccgacgctgtctccttgtgagcttctcggccaaagcacttactcggctctctctatgtccggcgagaacgctcacttcaacctctggatgcgccctcctacccttgaatgcgctgtcagaccttggcattcacgctggcggctggaaccgaccctgatctttcgggcaacgctgttgggtttctgaaatcgatctgggcacaatccagccgctgcgcgcgcaggcccccccgaacccgactcgccctcccgcgcggccgtcctcccttccctcagcagcaagtcatcccttctactccccttgtgagtctgtcagagccggttctggtcggcacgatcggcaggatgcagcagcaacaaggctcgtcgtaatcggtccagccgttcaggcgccagcaagggagcgtcggcggcgacctgcgcctccggccaactgcgggccggggatggacctcgcacggatggttctacctgcaggagccttatggcgggctcgggacaggcagagacaagcggcctggggagattctggacagggagggcgagggctcatgctgctgctcctgctgctgctaccgtcgccgccgtgtcgcacctccgagcgagctcggatcaagagccggcttgctgacctgccgccgacctcacctcgtctccctcgccgactcccagtcttcaagatgtcttccgacctccagtggctcctcctccgcaaggctaactccttcattgtgaagcgggcgcctgagggacccgtcttctcgactgagcccgttcgtcctgccgtcccgagctcgagcatcgcgtgcctgctactcgccgcagctaccctcgaaggtcagcccgggctgatgtccactcgcgcccttcgatctctttagggaaacctcacccagctccactcgttcaagtactccggtatctgcaacgagcgctcggttgacatctcgccctcgtccgagacctcgggcctcaccatcacccttcgcaacaaggacgccaacccccgtcacatcaagaaggccctgacctcgagccgcctgaagtcgggctcggccccccgccgggacgccaaggccgtcgcctcgcgcgtcgctggctaccgcgccgacctccgctcggtgagttgcgcacctcagtttccgggcgagcggggagctaggagggtcgggagcagagggccacttgggagcgtgtgagggcggctttctcgggcggaccgagccttgctaccgcttggtgaactgccgtcgtcgccatgggcgccggagaggcagcaggcaacgaccgagccgtggcgctccgcgagggccactgtcggacgcaccgcgccgaggcaggagagctgccgcacctggaccgcattgcgccttcagcgagcagccggctgacccttactcccgctcccgcttgcaggtcgcccttgcccgcgcctccgccatctcggccgcccagaagcaggctgtcaaccccaaggccgagaaggccaagaagacccgcggcaccaagaaggctgctgcccccgccgccgaggagtcgtcgtaaactcctcgcattctgaggggctatggatatgactgcacaaagagtcaagcggccgggaggaagagggtcacggaggaggagggcaccgggaagggctgtcaaggcgcccgcctgcgcgcgctgcgacccgcctcgctctctctgggtcgggcatgcgctctgcggtcgagtggccatacaagtacacaggcgggagcgtgtgggcagtctagtggccgaggccggcactcggagcggaggactcggtcagacgcttgacaggcacgtctggcgcctgcacgatcggggatcggatcagcgccggccagagtttgcatcaaagatgttcaagagagccttctcggacggacctgcgctgccgggatggtcatctccgtgtcgttgtccttctttgggttgcgcgggtcgccgaggaagccgaggtagctgtcgaggagggagcacaatcagccccgcgaacgacgagtctcaagcggccgcattctcgcccagggagggacgtactaaattctactcttctcgtcgccgggcgactcgccaaagtagagcgagagcgagacgacgtccttgaacgtcgacacctttagcgggtactcgatgacgccgtcgccgtgcgcagtctgatgagcgccggccgcgagcgagatctcttgcgacggcttgatgccggcggggtaagcctgcgcgtcggcaaaggtgatgcctgatatcgtatgggcgaggaggacgtcagcgtccactgcttccgtggaggtaaagagtgaaggagcgcaccatctggccgattcgcatacagccggacgacggccggcgcctcctcgccgcgggccgtcttcaagagcaggctccggacccgcacattctgcgtgaacgggaccgtgacgatcaattctgggtctgacaggcaggttgcagcaagagggatggggggtcagcgcgcaaggtcgttgcatctcgaacgcgtcggagctgtcaggacgagccgcaccgtcctggctctcgacccagacgctctcgtcggctcgcgcatcccactctttgatcatctccttggcctcgcccttcccccgcccgcggccctcaccggcgagcccggtccgcgccgcactcgcagcagcagcagcggccgacgccgacgctgacgtcgacggctggtcgacgttcaggccgtggaccttgtcccggtcgatctggccaaacaggttggttgtctcggccgagccggacgtcaaccggccggccatatgtgacgacgccagcagatcggtcagggctgaaggggagccgcggcggcgtgtcagctcgaggagggagacgtggaagcctggagggtgggctgcttactgaggtcgtcctcgcagttgccgctcatcctagaagcaaagtcgcccagatgggctcgatcagaggtttgtgtctacgtgtctcgatgacgtccagatgagagcttaaagtgacaggtcgaaaagagcggcgtgatggttgagcgggcgaggggcaaggtcgaggttcggtccagggcagcgatgcgcagcaagcaaggccccttggtgtgggcagtcggaggacccccttagcctgtagagaacgtgagcgacaagctgggacgatctaagcagactgtcgagtcatgagagggtgtgggcagcctcgcaggcttcatctcgcagctcccgacacacacagcgcccgcacgacgccgcccccggcaagcgctcggccttcggtcggggaagcgggcatgcattgaggacgtgaggacgtcaggagtggccacgcggagtgaatggtgatgcatgggatgttggcaccagcggaaggcaatcaggaagctcgaccggtcagggccagcagcaggtggccagcacccggggccgggaaccggagcaaaggcggctcggcctccaggcagacctcgactgcggcctgccactcgaaggaccccaggagggcactcgtcgagggggccagaagatagccaaagcggcctaggctaggtcatcttcgtccgagaactcggcctcgtatcgccggctgctgctgctgctcttcttggatcccccagtcttgcgcttcttctgccgccggtcctcctcgtcgtcttcctcgtcttcctcgtcgtcctcctcgggctcctccgcctcctcctcgtcctcctcgtccaaagccgcctcgtgccgcttcttgctcgactttgcccgcggccgctcctcgtcgtctgactcgcccggcggcgtccgctggcgctgcgccgcgcgctgctcctcgcggttggcgtcctcgcaagcgtcgatccagtcggtgctgaagtagcaagccggaagggagaaaagtcagcttgagctgccctccgcataaggtgagtgaagcgcaacaagacgcactagacgtctatcggcgcggagagagctgaggttggagaaagggcgcaggcgagcatgcggcgagcaagttccaggtcagcgatcttcttccaagcacctcaccgccagtcacaccccgccatcgcagagcgcgggtacagagcgaacggggggctcacgcgtgatgtggcagctaaacttctggaggcacgtcttgcaccgaaggaggccaacgctctccttttggtccatcttgacgctcaccgagttcgaattctggcagaagaggcactcaaagacggtgtctgcggccggtaaggagcatggcggagcgggtcagcgagctcggactatctcctgttgcctgctctggggcgatggcaagggcaggctcagggtggtcgacgcaccgagcggaggcgggcccttcttgccggtctggggcttgctggatgacttgcgctttccccttggcgcaaggagcggcagacggcgggtcaggatcgtctctgagagcatggactgcagctcctgcaggctacgcacatcttggaggctaagggtctgggaggagatggagggttgagatcggggtcgggaggggcgaggcgcgctgggctctcgcggcactctcgcccgccggtcaggcgccggaagtcgtcgtcggccggggtgcactttgcgagaacacaatctgctgccagtctggagtaccgcattataatagaaaaccaggagtgatcggatttaagggggagagctatgtaaacgaatatatgccgagaggaagcgctgcaagttggacggggagcgcgcaatgtacacgagccgacttgagggctcagatggtgtcgaccgcgttgtagcgggcggcctggcccacagggctgctgtcctggaggccgccaaagtcggcgccctctccggcgtgctcggcaatctgcttgatgttcttgcccgggtccgacatgtcaaaagcgggcgcgctctgccccgggttgtgggtgcccatgttcgagacgttcattgggacgaagatgaccttggagttggccgtcttggcctgcgaagcgagaatcggaaagctggatcagcagagagcgaaacagaggcgggaggtaaaatcgctcaaagggagactgaccatggcctgcagggcgtcgagcgtccggatcgacatggctgcgggcgaagcgagaatgtctgcagcctcgcgcataaggcgggcggctggtgcagcaaaagtaggttcgggtcagcgttggtagacgagaggtcgaggtgtaaagagtaaaccgaccgtcaacttcggcccgggcagcgatgatcttggactctccgatccgcttggcctgggcggctgacgagagcgactcctggagcgactggctgaagatgatatctgcaagagagtgtcaaaaagagggaggtcggtcgccttgttgacgcgtataaaggaaggaccaaggggagacgaaccgcggatgaggacactctcgacgacggcgccaaacttctcggccggagcagagatgatctcctggatctcggccgcaacgagctcgcgctcagtaacaaccgactggagcgagcgcgagccgacgacgttccgaagggtggtttgcgcgcgctcgacgagcgttcctcgaacgtctccgataccaaaagtggccttgtaagggtccgagacgtgccagcaaaggaccgagtcgatcgtgacggtaacattgtctgaggtgcaagagatccaatgtcagcaacgcctgacctgatcacggatatcctggccgcgactgacccttagtcatgaccgtttgcttaggaatcgaatcttgcatgattcggacgtcgaccgtcctgatgctctcggagcagacctaaagagcggagggagggcaataagtcagcctcctttccaatcggaggagcgagatcaatcgacggacgttaacgttgacgagccctgggtcgaccgctttgtagaactggccgaagcgggagacgagtccgacagagccctggttgacctccttgaagctgattcgaagagagggcatgatgaggcgtcagtgcgtgatacgcgagaggaaacgggcgtgctgagactgacgggttgggcagcgggcagcaggggatcgcgccaaaggtgccgatgcagctaccgaggcccgagatgaaggagccatagacgccgtgctctgtccattgcacaagggagagcgtcagaacgcgtgatcggaagcaagcgggtggggggcgggccggaaggaaggaagcgggaggtgcgcgcgacgggtcgcgctcatcaacaacgaaggagacgaagacgtacggacgctgccggtaccaaggtcctgagcgtacgacggctggagcgaggccttggccagaggctggacggtgatcaggccaccgctctgctgctgctgctgctggccagcagccgaggtggaggcggctgactgcttgcctgcatacgacggcgacgggtggtcgtcggtcacgaagcgctcgaagtcgggcggtgaggccgagccgttgacgtgcgtgccgtcttgtgaaatctttgggttggacattgggtgggatggaagggttcgatggtgggctcgatggtggtggttcggagggagagagagagggcgagggctgcggatccgcgcctcttcaacgacttgagacggcggccggcggccctcttgtttggtccaccacctgtgagcccgtgccgagccgaagcagccgtcatcgaacgatgccgaaagcggatcggtcggctcgacaagatgagtgccaagctcgacgacaagagcgcggccgagcgagttcggccggaagggagatgcgagtcccaaggccgacgacgagagcgggtgcgccgagcagcgctctgctacggttagcaaggggccttttcgagagaccggcaactctgctcgcctcgtgccaatcttccgcagccagcccaccggcgccgatgatcgtgtcaaacccacctcggcagagatagcgagcgacgtgagtcctgccgaacgaaaggagcgttccagcttggcagcaggacatgccgacgacgaccgggtcccgactctgcccggccggcaggcggcgaacgatgacctgcgagggtcatgtcatcggcagcagggctcttggctgctagggaactctgttgatacaactagacaaagaggggatagacagagttccgcatgctcgagcgagcacggaggggggcgcgaggcgtctagatgagggaggataaggtacactacagggcagaagagggcaacagcggcgcacagtttgcgagacgcaagggaagagaagggacagagggggaggactacaatttcagagttcctcctcgggcgggcggaacgtcaggacctatatcgagaggagcactcgtcagctgcgagtctcgttggcagggatggcaaagggcgggcgccgcacctccatgacagtcttgccgctgcgcttgcagaggacgacacacttgtcgtccttgaagctgacgcgccagacggcctcgcacggcttggagagctcgcggataaaggccccggtccggaggtcccagagcttgacgcggccgtcgttgccgcccgagacgacgaagcggtcgtcaaactggaggcaggtgaccgagttgtcgtgcgcgcagagccggtgcaggcactcgaaagtcgagagcgaaaagacgatgacgcggccgtcggacccgccagtgacaagcaggtcgtttgtcagctggagctggccgacgagcgacgtgtggccctggaggagggcgaggcagtcgcccgtctcggccgaccagacgcggacggtcgagtcaagcgagccggtcgcgacccgctcgccgtcaaacgcgacagagtatatttgatggtagtgtccgcggaacacctgcaggcactcgccagtgtcgacgtcccagagctgcgtggagggaggagcggatcagcacgaggagcgggcgaccaagggccatcgcgaggcgacgcacgcggcatgtgcagtcataactgccgctgacgacctgattgccggcgacctcgatacaacggaccgagtgctggtggccggccagcaggtggacgaggacgcctcgctcgacgtcccagacgcggagcgtcgcatcgcgcgagccagagacgacaagcggccggccctcgagcaccttgaggcagcggatggtcgacgtgtgcccgcggaggatgtagagacaggccctgcgagatcaacaaagggggcggtcagccccttgtcgcttgtcatccgaggatagaaaaagaaaaaaaaaaacgcacccggtctcggcgtcccaaacacggacgtcccggtcgcagccgccagaaacgatgagcgtcctgctctgaccaaagcccttgctcgcgccgcagacgtcgctctgggcgacttttggccggctgcccccgcggctcgccgacgcgtgaaaatggttgtcgaacgacggcgggagcgaggtcgtgctgctcgcggccggatgactgttggccgaaaagtcggtcaggccggcatataggccctgcggcggagggtgaccggcaccgttcggcgagtcggccgagccgccgataatgaccggttcatgaccgccgacattcgccgaccctcctcctccggcggaaggcgtcgtcatcgtcgggccgtcgctcgaacggcgtcgtcggtgcgatcggctgccactgccagcggaccgtccagcggccagtgatgcggcagccgaggcactgctcgccgccgccgcgcgatagaatgggtcggcgtacgctcggctcaaggagccagcgtccatgtcgacgtcctcggccgatttgggcggtggcgccgacttgcgctctccgccagccgagatgagtgtgaggcaccagacgccgagctcgtggccgacgagcgtccggagaaaggtccccgtcgccgcgtcaaagacgtggatcttgcagttggccataccgatgacgatgtacttgtcgtcgacggcgagcgaggtgacgacgccatcgtcagtcgacgtgtgcgtgctcagcagccgaccgccgcggagccagttagactctggaaggaaagagggtcagcagagcgtcgacaggaccgcactcccaaactcggacgcaccggtcaagtaggcccgcttgaagtggcgcttgtaggaaaaccgagcttcctcttcggcctcgtcctcagcctcgggcgacgacctcccgccggcactccgccggcgccggggcgccttgcctttgcctttgctcttggcggcgatcgacccgacctgccggccgtcctcagcaaagctgctcgacccggccagcggggacgaggtgctccggccgccaatcgaggccgtccgcgctgggaagggcgcgaggccgagcccgcgcggtaggaagatccggccctgctgctgctgcgacgtgctggcggcggtcgggctgctctcgtcgtctggcagcgtctgaggcggctccgctagtgctgctggaggagcagcagcctggccggcctgagtcggggcggcccggtttggcgtgccgtaaggcaggccgagcgtgttcgtcagcgacgcaaagaagcgcgtcggtgacaagctcggtccaggcgggtgcgtggcggcgctactgctgctgccgctcgctgtggcagcttcggccgcggccgccgcagcggcagcagagacgggcagcgttggcccagagtgtggaggaccaggctgcgcctggccgccttgagcgtgagcctgcatatggaggccgtgctggctaagggctggtgacggttgctcgctgtccgacattgcgctgtcgtcttcgtcggccgtcccgaagggaaattggctggcaagaccggccatgccggccggggcgtggaccgaggcctggacggacgacagcgcataggcgaggaacgagtggggcgaaggcacctcgagcgcctcgcgcacggcgacggcggcggcggaatggcctgagccgccgacctgggcgcggaaaaggtccggcagggaggggaagctgccgagcccgctcgcgaaaaaggcattctggccggccgcggtcgtcaggtcggccgtcggcggcacggggacgatgccgctggctgacgcaggaatcgacggaccggcggcggcggcggcaacagcggaggaggcgacgtcgtcgtcatcggtcgtctcgacgaacccctcctcggcgtcggtgaagcgagtgacggacgaggctgaggacgactggaaggctgagctggccgcagggccgccgccggcctgcgcgacgtgcggcggcagcggcccaaaggctacagggctggtgatggcgccgacctgacgcatccgcggcgcgccgggcgcttgctcgatcccgagccggggcgagccaaacattgtcacgtcgtcggtgatggtcctctggtcgtccgacgttgccgccggcgaggacccccggccgccaccgacagacgtcgcggcgaagcggtgcctcgtgcacatctccttccaggtccactcgtcctcgagcaaatggcgccagaagcgactgacgcagctcgcccgcgcgagcgtcctcggctcgtcgacaaacgagaggatgtggagcgcgagctcgagcgggaggtcctggagaaagtcgcgcttgagccggggcgagatgccggaagagagcagaaggagctccgccgttgtcagcaacggcaggagcgcctggaggaggccattccgcgccggcggcggaagctggttgaagagggcgagcatgtgcgccgtctggctctcttcggctgtaaagcaagtcgttggtcgtcggatcgggaaagcgtcatcgtcagcaaggcacgctcatcgtcaaaggggcccggggaaaagcgaggcgctcccttcccacggaagccacacttcccaccctcagaaaggagagcggacacgcaccagaccggccctcaatcgtgctaaagaaggtgacggcgttgaggccaatctgctcgctcggccgcggactcggcgccggcgtcggcgggctgacggctgccatgctgagcgcgacgccctgcgccggtgccgggccgcctgctcctcgcttggcgtcggccgatgggccggacggcggcgacgcccggcggtcgtgcaggtgatgacggtggtggattcgataggcgaggtcgtcggctgtcgacgtcgaggctgctgttgccggagacgacgaggagtgcggctcgccgccgccggccgatggcgaagggctggcaaggtcgagctcgaccgggcccggtgccggcggcgtcgagggcggcacggcaaatgacgagagcgacatgtgtcgcagtggggtgtgctggttcgtgtgacttgtcctgcgagtgttattaggagtggtcgagggcgagatggtgcgagggagggacgacgaggacgacaagcgaagtctcggtcagcagccgcaggctttcgcaggcggccgccatcgagccctggcgcagcagaccgcccacctgccgacgcggcctcaacggttctcacccaccagatccaatatcatgcacatcgggctacaggaatggccaacggccgcacgcaccggcccgtcgaaggcttcttcgatcctcgtgtcaaacggcgcgactcggctcgcctctgacgacggctcccacgtgcgcccgcccattcgcttgagctctgcgcagagtctgacaagttgacgggccggggattaaaaggtcgggtcaggtttcagaccgatcttcgtcgaaaggtcagagggagggcggccgaacgaggagagtttcgttttggccgcttttcttgccgtccggaccgagtgacgttttcatgctgggctcttctttctcaaaggcgaatgatcgcggccgggtggaccggccgtttggaccggccgttcgagctgagccgatgacaggaatacctccgtgcgactagccgtgtgcaggccgcgagaaggagagagtgaagagggtacgtcgaaagaggcgtgtggatggcgcaggctcgaggaggccgacgtttcttcgacgggagaatcaaaagtggagatcgagctccttgccggcgggcgtctcctgctcgattgacggagagagagagaaagaaaccagccccgatcagcctccaaaacacctctcgcggacagtcccccccaccttcgcagtcccaccccgcgcgcgcgcgcggggtgggactgcgaaggtgggggggactgtccgcgagaggtgttttggaggctgatgctcggagggacggcagatgacgccgcgcgcagcaggagcgtgcagcactccgggcagcccctctcgctcgacaaggagtgcaggctgagccgagccgagcgatggcgaactgatcgacggtcgcgtgcctcgagatccgagcgaggcaaggtccgacttgtgcgaggctgcccggagtgctgcacgctcctgctgcgcgcggcgtcatctgccgtccctccgagcaagcagcctgacccttctccgtctcttgctccgcggtagcgtcacatccgtctgagagcgcaaaccggcatggagatgtcgggccgttgagaccggtcccctcgtgcccggtcggaaaaagggagcagatggaggggcctggctgagctgggtgacagacgctgtctctgcgtgcgggctgcagccggccggtcgacgccccggccccgacccacggtcactctccgtcgtcgttcgaacacttttcccttctgctcatcacctcgagatcctttcgcaagggcagcacgacagactacgaccctctaccgcatgcccaagcgctcgtctgccgccgccgccgtcagctcgtccgccctgccgcctgccgccgccgccgccgctagcagcatcagcccgcctcggccgccgtcgttcagcggcttcggctcgacctcttcctcgcaaggctcctcgacccgaccgacgacgcgctcaaaggcaccctccgcttctggccagcagtaccctcaccgtcagcagcagcatcagtcgatggacagctcgttctggtcgcctggctcatcggcctcgtcggtgtttcagctggcgccgccgacgagcgtcaaggacgagcccgaccagctcgcaggtcactttccttcgctcaggctcgcctcggcctccgaggccgagtcggggaccgacgccgaccgatatgaggagcaaccactgcgggcctacaagggcggcggtgcctcatcctcgtcatccaaggcggcgacctcgacccgaggctcaaagggcggctcgaagcgagccaagatgtcggaggaggacgacgacgacgatgagggcgacgagcccgagagcggtgccgacggtggtggtgtcaagcgcaaattgagcctcaagacgcgcaaccgactgaagcagcgagcgcaccggtgcgtctccgatctcggctggatgggcccacatcaagctccgccaggagattgctgacatccactctcccgtgctcgtcatccagcgaacggcgagcgctccacctctccacgctcgagtcacaagtagccgagatggcgacgctcaaagccgacctcgcccaggctcaggctgcgctcgcgcacgccgacgcggtcggtcagggccagcggatgacgtacgaggctctcatccgggacctctcgatgcgcgaccgcgagcgcgagggcttgttgcttgccttccagtcggagatcttccgtcttcgagcccttttgggcggggtaggaggaggaggtgccgctgccgctgccgctgccggcaacaacggccaggacggagcagccgaccctgcagctggtgccgagactggcggtccggctggccagggggccgagtcatcggcgaagggtacactcgcaggcgctggaacgggctcagcagctgcagctggcacgagcaccggcagtgcaggcgctcagggcctgcccaaggccccgccgccaccacctgacggcagcctcgggatgggcccgcctcagccgtatccattcgctgccatgggccaccagccgatgcagcagcccttctacttctttgcgccgccaccgccccctccgggccagccccacccctttgccggacaacccagtgcgttttgcctctgcttggcgcgaccgcttgtagacgaagatccgttggctgacattgttccggtcgacagtctggcacggccctccacctgcgtttggcccaccgccagtggccgatggcaagcagcggcaaaacggaggtgcgttgtcgaagggcggcgtggcatcttcacgctcgggtcaaaggcgcaactggctgatcctgctgcacttcgactctatcagcaggtcccggtacgtctggccagcaagggcaggccggccctcctcatcagcactcgccgcactactattcgacttcgccaggcgagggcggcatgccgtacaacctgtttccgccgcatctgcggcctgcggcaacgggcctctcgcctaaagcgtcgcccgagggctcagggctcgtcccgccagccaatgccgaggccttgtcctcctcctcggccgcctcgccctcgctttctcagcagggctttggcgacaacgcgagcggtgctgccggaggcggaaggcggagcagcacgtctccggcgggtcaggcgatcgccgtcagctcgccgccggtgccgtcgtcgagcaagctactatcgaagctgcctcaactccagactcagttccagccgtcgccgccgctcccagcgccaccaaggggcgcagctgggaaggaggctgcggctggtgcagacgaggacgacgaccggacgccggcaggaggcaaggagccgagcgattcgcttgttccgatgatcacatcgccgtcaatcctaacgccgacggcggcggcgccccatcacggcctctatccaccggcaggcgggccgcttccttcgccgttctcagcttttgggccgtacggctactcggctgcctctgccggcggcggcggaggcatgtcgggccacaactggtccttcactgcgacgacaccgacaaacggcatgggctccgccctctggggcgggcttggccttcccggcggccagacctggccctggatgggcatgggcggtggcgtcagcccggtcgcgacgagtccggcgtgggctgcttggggccaacctccgagtggccgaccgtcgtcgtctggcgaaggcgagggcagcgcagcctgagcacctctcgccgcatacgtcttcacgcggcccacattgcgacccaccccaacactgtagctttacgccccaacggacctgttgccctctttccgtcacttctcgcgcgcgcagagatgatgcgcctttcgactatctcgagccgagagtcaagaagaggggtggtcatgaaattgcgatgggttcgagatccggggctcaggagggcggtcaggggcctgtcggtggctcgacttcagattcgacggccgccgtcggttctgcgtcgtctgcggcaggcgtgcccgagccggcctcatctggcggcaaaggcgaaggcgcggcggctgtcggcggtgcagagctgttggcgacgctcggcgtgacggggctcgtgagcttgtgcggcgagagcgagtccggccccgacgaaggcaaagggatgccgccgcggagggcgagctcgttcttcttttgccggagccgctctgtctcttcgacgccgcccgtctttttgagcttgcggccctcgacaaagtcggagagctgcgtctggaggacgtcgtcggcgccgcgcttctcgtcgagctcgcgctggcgcatccgggccgcattctcgatcgccttgagccgcttgtctgggtcgacgcgcgagccctggatgccaattaggacagacgagagcgactgggccgggtccttctcggtcggcgacggcggccggtagcctcggccccggccgacggctgccgtaccgccagcggccgtccgctgagcggtgtagacctcgatttggccaaagaccttctggaggttcgtaaagtcctcctcgatgtcgttcgtgaaggcgagatggtacttgagctgcttctcttcggccatgacgttctccatctcctgggcccacgtcgtccgccaggttgaggccgccgtcttggttgcgccgacgaggtcctggagctggtgttcggcctcggtgatgtctttcttgagcgagcgcatcagcgtcggccgggggacgacgagcttctcggtgacgtcggtgtagagctcctcgatgacgtcctggaggtcctcgaccttgcggaggacgtcctgcgactgcgagtcaatcttgaccttgccggcctcgacaaaggcccggccgccgccgagcgacgtgctcgcaatctcgcgcacacgctggttctccttgcggagcgtcgaaaagatgtccttcattgccttcatgccgtcgacttggatctggcgggcgacgccgaggtcgcgccggagcgtctggagctcgtcaaattggttcttgagctcggtcgcgacacggaccgagacggtcgctgcgttggagtcggccggggcgtctggctctggtgccgacggcaagattggcggcgagaccggcggaagaggcgtcccaccgttggatgacggcgagcgagggctttcgaagacacccgtttcggccggccctggcgcgagccgcttgccgccgtcggccgttcggatcgtctgcggcgagaggccgggcgagggtgaacggaaggcgttggcggccgtgccggtgacgacttgcgacagccggtggctctggacggccggcgcctggttggcctgtagcgtagcaaattgggacgagagcggcgcgaccgagtcacggatcaggtcctcaagcttgcgtgagaggccagccatctggatgtcaatgtgcgccttgacctggtcaagagctgtcaaagcgaagatgtcagcactttagccttggcagcgggtcacaatcggcgcgacgcacgctcgatgttaaggctcagccggacgccgtcggcgaggtcctcggtctcgtcccactcgtaccgccactcggtctttggatcctggcagtagatagccggccactcttcgccgccctcggtggcgtagccgaaccgctccataaacagcatccggagaacggggatgctcggctggggcgcgatctggacctttttgcactcgcggccatggaggaggaagacggtgacctggtccggcgtcgtcggctcgacatcgaccggccctgcgccgtcgtcgaccgacgcgaaggacggcgaaggggcgagcgatcgaccggacggtggcgacgactcatcctcctcgccaaggggggctaggccgggctcgagcgaacccttgggcgtgacgaggccgctcctcgagcggacgacgctacgcgccggcaccgtcgggagaccgctgctgccaacaccgctgggcgaagccgcgtccggctgctcaacggcaacctccaatccggtatcctcggccggcggaacaaagcctcctccccggaggggcgagccgcctgttgggacgggtggccgctcagctcggctcggccgcgcaggactcgcccgtttcgtcatcgacgaaaagtcgccgaggctgctactagtcgtaagcgacgacgaggcgtccttcatgacgcccatcatgccgctgacgcgccggctgctcttctcgcgcttagccgggaccgagtccgagatcttttcgatctggtagagcgagtagcgttgcgaggcccggcgcgagatggcgttacccgacccgcggaggttcgagagcgtttggtcggcaatcgagttgggaatgggcgggagcggtggtcctggctggagaggctcgaccgctgagccattggctgacggcagaggcagcgtctgcattggcggcgagggagcgagcaaaggggatgagactgggatgggcggtagctgatgcggtgaccctggcggtgaggccgcggtgacgatgggcgggagaggcgtcggcttgggcgacggcagcggcatcgtaatggcggccatgggaccgcctgatgacgacgacgaggatgcatgaggaggagagactggatccgagcatgagtgtcgcatcctcggtctcggcgagagcggtcggttgtcggtgggctcggccgacgttgtcaccgccaatggtggggcgggccccttgccaagaccggccgactcgtgagctggcgatctcgtctgccggatgtcgggcgcgcttccaccgaacgccgagctctgcagcgtcatgctcgagctctggctgcccttgtccgaatcgcgactcgaggcccgctcgtcggccggcatcgggctccttgaccggtcggcagagtcaccgctgcccccgcctgaccggcgcggaggccggaaggcgtctggcggaggggccggaaggggttcgcctggtcgcgatgcctgcggccgggagcgggacgatatgtagctgcgcttgggcatcgagtggggatcagcgagcgacggcggccgctcgggtggagtgtcgtgaggatagacgaccgagggcgcaaagctcgagtaaatcgaggatgacgtcgaggtgatccgttccgggtaggcgtgcggctgaggcgcgacctgcacaggaggcaacctcgagccagaggacgacgcctgcggctgaggtggcagcggccgggacgacggtgatgcgttggcagcatgagggccgtggccagaatttgacctcctcggcggctgccagcgcgaggcgtcgtcgggtgtcggtggcagcggcgaagcatggcgcgcaggtgacggcccgtgcgacggctcgggcgtcgctctgcgccggtcttcgccactgcgccgcgtctcgccgctccgacgcccgtcggccgaccgctctctctgaggagcgggcgggtggccagcagggcttccagcgtactgatccgaggcaggaggcctccggcggtcgtcttcccgccgggcccggtagacagcctgctttgttttgaggccctgcaggagattgacgattgtcgtccgaatctcgggcagtgcccgctcgaggttctgcggcgtgggctcctcgttgatgcatcgctcgaggcagtctcgcaggacggcaggcacggaaagcaggtccctaagggggagggcaaaggagttaattcagccgagcccatctacgccgcaggtcatcagggacgtactgcatggggatgtcgagtgcggtaaaggccgagacggcggcgttgaagtcgttgccgagcttgacgtagtagtccgagacctgacagcagggcgagccggagaaggtcagtcgaacctaaccagagcgttgccctctcgagcgccgcgcgtcgctagcgagcgacccgatgagcagacagcgctggaagggtacagctctgatgacggcctcagacggacgaacctcggtctcagagatcttgccgacactccagtccgtcagggagcttaggagctcgcgcgtcgagaccagaagctgaagagacgtgacgtgacgtgacgggtagggcgtcagccggtcgaagagctcatgcaagcgtctgctcgaggctctgacgcaccttggtgaccgctgacgaccgcgatgacgatttaggccgcggcagcgaggagaccgggtaacgagggaagaaaggcgcgtcgagaggagggttgtcagcatggtccggccgcaacggagagcggcgacggctcgcaaggccagagacgggggaccgcaccggactccatgtctgtcgatccagaggcatcacaggcagcattcgggaccgacagagaacagcagaaggaggagccgacggtcagcggaaggactgcgcaagggaggggagggagccggcggcgcacgggtcttctcctgccaaggtgcgtcaagggtcctcgtcagcacagcaccccacagcagccagaccgtccagatcaggtaagggtctccgagagacgcaccgacttgcgagtcgactggacgctctggaccgacgacgagctctggtgcgacggcgcccgacgcgccgcctcgcccgccgaacggtgcgggtctggttgcgacgacggacgcgacatgagccgcgaggaagcggtcggagcggggagagcgggccggagaaacagagagccttgtccttgctctagagctgccagggacgctagagagggagggcaggcgaggagcaaaggtgatgatggcgagagggagcaacagggcggcgccggccgtgcggctgaagatgcggcgcgaccggctcgaggacgatacctcgcaacgacgaccgtcgccccctgcccgacctctctcatccgaagctctcatcgatcgacttgtggccatggcaggcccgctgtccatcaccgacctgctcgagaagcagcgcaaggaaaaggaggaggcatcgaaggtccgtccactcgccgaaggaggacgccggaggtccctccctccgaccaccccttgccaccgcggagactgaccggccgatctccttgtgactcctgcagcctaagtttctgaccaaggccgaacgggcagcgctcgcgctcgagaagcgccagaaggagatcgaggagcagaaggcggccggcgaccgtgcgcgcaaggagcgccaggagctcgaccggaagctcgacgaggagcgcagggcggcctacaacgcccccgtccagcagcacggccatccctcgcagcagtacaacgcaggaggaccgaatgtccgcggtggccggggtcggggtgtatacggcggtgggcgtggcggtcggggaggctacaatgacggtggcggccgcggagggtacaacgacggtgcgtcccatcgtctctctccccttgggccctagcagtactgattgcctgcggccgacctcgacctcttcgacttgccaggttactctcagcgaggcgggccctcttaccagcagggtggccctcctcccagtggccagtatgaccgcggccagccgcacggcggcagctacgatcagccgcctcgccagccctcctcgggcttcatgggtccgcctgcgaacggtccgcgtggaggcccctcctcctacggcggctcctctggctcgatcccggaaggtcctcggaacgggcctggcctgccaccgacgtcgggcggctcgagcgccgacgtcgtgcccgagtacgacattgatgcgatcaaggcgcgctacctcggccaggaggccgccagcaagaagcgcaagctgcgaaagacaaacgacaagaagtttgtctttgactgggaggccgacgacgacacggccgcctcggcgcacgcaggagctctgatgatcggcaacggcgtcatgctcggcggctcgcgggccggcctcggcggcgggcgcggtgtcgaggagggcgagcgcgatccggcgaccggcaagcgcaaggaggaccagtatgcggacgagctcgagcgccggagcgcaaagaagagcggtggcgacgaccggcactggaccgagaagaagctcgaggaaatgcgcgaccgcgactggcgcatcttccgcgaggactttagcatcgctgccagaggtgcgtccggcccgagctctccgacttgcacttactcagcgctgacctgttgtcgtttcgtctgcacctaggtggctccatcccactgccgctccgaagctgggaagagtcgacgatcccgtccgggattctcagcgttatcaaggaggtcggctacactgagccttcggcgatccagcggcaggccattccgatcggcctccagaaccgtgacttgatcggtatcgccgagactggtcagtcgctgttgcgttctctcccacctcgccgccagcactgacccagaggcgctccctcaggttccggaaagacggcggcttttgtcatcccgctcctgacctacatcggcaatctgccgccgctgacggacgaaaatcggcatcagggaccgtacgcccttatcctcgccccgacgcgagagctcgcccagcagattgagtcggaaacgcgcaagtttgcgaccccgctcggctacacgtgtgtctcgatcgtcggtggccggtcgatcgaagagcagcagtacaaccttcgcgacggcgccgagattgtcattgcgacgcccggccggctcaaggacatcctcgaccggcacatgctcgtcctctcgcagtgcagctacattgtcatggacgaggccgaccgaatggtcgacctcggtttcgaggaggagttaacgtttatccttgacaagctgccggtcgccgaggagggcaaggtcctcgagccgggcgacgaaggctggcggatcacgacgctgttctcggcaacgatgcctcccgcggtcgagcggatctcgaaaaagtacctgcgcaagccggcggtcgtcacgatcggcatcgccggccaggccgtcgacacggtcgagcagcgcgtcgagtttgtctctggcgacgaaaagaagaagacgcggatgatccaggtcctccggacgtgcggcctcaagccgccaatgatcgtcttttgcaaccagaagaagacggccgacatggtcgcaaaggacatccagaaggccggcttctcggcgacgacgcttcactcgggcaagaaccaggagcagcgcgaggaggcgctccagtcgctccgcgaaggccggcatgatattcttgtcgccaccgacctggtgcgtccggccctgcccgcccctgacaaggatgctgctcccatcgctgacctctctcggttgctcttgctctcaggccggtcgtggtatcgacgtcccagacgtctcgctcgtcatcaactggcagatgagcgcaacgatcgaggcctacgtccaccggatcggtcgtaccggtcgtgcaggcaagaccggtgtcgccgtcaccttcctcgaccacgccgacgacgaggtcctgtgcgtcgcttctactcgcttctttctccttgcggccggctgacgtttcttccttgctcggcggcagctacgatctcaagagcgagattcagaagtcggagcgttcaaagctcgaccccgagctcgcccggcacccggccgcgcagcagaggattgccgccgccgacaagtacaaacgcaagcggccaaagggcgagaacgacgactgaggcgggaggcgcggctgtgcttgtggtagaatgagcctcttcgctcgcggcgaaacgtcggcagggcgcagagagatcctcccccgctcccctccacgcaaagagacgtgcgcctcttgatgtgtggacgtcgcttgttagcctttcctggccattctgccgcaactgaaatggacgacctctgcggaaccatgacgcatccaggcccagccgtacggatctcgactcgcaccttcttcgcgaagcaaccaaacggctgaccgtgccagcttggccttatatgggacctggaaggaggaatgtgcgccggtagacggccatccatcttctcatgccccaggccgacagctcgcccgcccaggacactacgacgacgacacacccctctgacgagcaaacgatcgagcgtgagcgagcgagcggctgcgcccaggacgaccgcgtgaccattgctcgctaacctgtcattcgactcaaccgaaacttcagcgacagaaggaaagaaggatggctctccgagccttcgaggagagtcgcctggcctggggtcagacgaggacgaggaccccaatggtgagtaggagcgctcgacggctcgagaggtcggctccgaagctgaccgtgccgcctgtctcttcccgggccatgaatgacgacagacgaggttgccgagctgctagcgacgctccgccgacaaggttcgtctctgccgtccttcgtctcttcagaactcgaccttgcctgactccagcaccttctctcgacagacggagaagccgcggccctcgctgaggagctcgcgcggctccagcaggagcaccacgagctgacggcgagcgagttcggcaaagacggagggcagcctgaggaccagaggagcactgctgcatgacgcgctgagcgaccagtcggaggtcccgaggtcgtggttaagcatgtctgccgtcagctcaagctcgactttgaagggaggaggagcgagggacggctgcgcgaccagtcagcgcgtcagctttcgcgacccgccgacgactgcccgccccgccgacctcggcttctttgactgcgtcgcatcacttgcctactagcaagttcgctcgatctgcgcgcgtcggtgtgctgtaagtcagggaagggaagttggcgagctgtcggtctgcaggaggaggaggaggaggttcgcccgtgtcgagtcctaataaggattacgggagggtccctgccgtcgcgcatccagccgagtacccaagcacacagccttccgcacgaccaggtcagccgacatacacctgtggggactgctgccaagcttaggtagcagtctcgctcggtgcatgccgccgggtgtgtcgatttcgaagggaacgagagacgacgaggcaggctgagacaggcagcttgagacgggcagctcgcggcgcacctgacccgcagaagactctttccggaccgggctcatcatcaggagggcagggcactagctatgtctggcgtgaagctgtattagggatagagcagcagggacgacaaaagacctgtgagagtggagagagggtgcaccagcttgagctggctgcgccgaggcgagctcggacgagcacctcgccgagcgagacgagccccggccggcaagacaagagatgcccctaggcagagctcgggattgagaagcaggccaagccagtgagatgtccgaggcagagctcgggaagaacgagccggcgaggatgggcacggggccaggcatctcgccctgggtcaaacagtctcgtcgaagggggtccaagacctactcctcgttgcacatcatcagccaaggggtgctcatggccgcctccttgacggcctgcctctggtaccgccaagcgtgcagaggaagagccatcagaagggggcagtgatcgttctgggtcgttcgttccgatgatcgggatgggcagagcggagggagctctcactctcggtcgggcactctcggtcgggccgatcggacctcggtgccaaaattccgacgaacctgcgctgcggccgagcttcgcaggcacgacgacttgagctcctccagctcgtcagccttcaacccgccctttgcttgctcgctctccgtctccaagctcgctcctttccttctcccagagcagcttcaaaaatgaacggccgtgccgctaagccggcgctcaagacgaggtgcggccctgcctgagcagcctcgcgcgaggtcgcgagctcgagagctgaacctgctgcgtccccttctccggcggtcagctaccgggccggacacctgatctcgccaatccatacccagggccctgtcctcctgacgtctgatggcaagactctcatctcgacaactggcgaggaggttgtcctgactgacgttgagaccggccgggcgatcggtcgcgttcagagcgtgcgtcccctggctactcacgttggcgctcttgcgactccttattaccggacctgctgctgaccagacttccggcttgcaggacacgaccgaggtcacgtcgatgacgctgtcagagagcggcgtgcttgccgtctttacgcggtcgctcgccctccgcttctacacgatccctccctcgcttggccactcgctgccctccgagggcgcgtcaacgtcgaccgcaccgacagaggctcccctactcccgctcatccgtcacacgcctcgctcgcacccggcgccagtcctcgtctcgacgatcgacccgacatcgacgctgctcgcgtctggttcggccgacggcctcgtcaaggtctgggatctcgccggcggcttcgtcacgcatgtgttccgctcgcacggcgggcccatctcggccatgtgcttcaacctgccccgctttggtccggccaagggcagccggatggagctcatcaccggctgcgccgacacgaaggtccgcgtctttgacctgcgcgacgtcggcgccggcggcaggccccgggccgtcatcgagggccacgtcagtgtcgtccgcgggctcggcgtgacggacgagggccgctggctcgtcagcggcggccgtgacaaggtcctcatggtctgggatctctggggcggcgacgagaacggctgggagcgccttgccggcgcggtcggcgacggttcaggcggcgcggctgcggccaagaagaagggcaagagcaaggcggtcgaggttcagctcgtgcggacgattaccgtactcgagagcctcgagtcggtcggcgtccttggccgggacgagcacgtcgctggcctggagggcccggtcggcggccgcgtcgtctgttggagcgcaggcgagaagggcatcgtccgggcctggaacgctgtcgagggcacgcagctcgcaaccttccgcggtgccgagggagtcaatgccgttggggccgaagagctcgacgaggacgagcagcgaggcatcgtcgccgtctcgtgagtgccgcctgcggctgagcaagttcgcccccgcctgccggctgaccagcttttttgctccttcgcagccacaatgccttgacgtcgacgctcctgtcggtccactcggatcagaatatcctctttcactcgctcaggacggcggccatcagccgccaggtcatcggctacaacgacgagatcatcgactctgtcttcctgacgccgctgtcgacatccgaggcctcgtcgagtaagcgcgacacctcggttgcctttgcgaccaactcgtcgctcatccgcgtctactcgacgagcacgtacgacgcccggctgctcgccggccactcggacatggtcctctgcctcgatcgctcaaaggacggccagtggctcgtcagcggcagcaaggaccggaccgcccgcgtgtgggcctgcctcccgcctgcgaccggcggcgagccgacatggcggtgcatcgccgtctgcgagggccacgccgagagcatcggcgccgttgccgtcagccgcaagccggtcgcggacgagtcgctcgctcgggccggcatccgcgccggcttcctattcactgcaagccaggatcggacgatcaagatgtgggacctgacggcaatcgatctctcggcggccgagccgacaaagctccggtcgctgctgacgcaaaagattcacgagaaggatatcaactcgctcgacatctcgccaaacgaccggctgcttgcgaccggctcgcaggacaagacggtcaaggtctttgacgtcagctttacactgggcaaaaagggcgcaaagagtgctggcgccgtcaaccagctcggcacgtgcaaaggccacaagcgcggcgtctggagcgttaggtttagcaagacggacaaagtcctcgcgaccgcgagcggcgacaagacggtccgcgtttggagtctcgacgacttttcgtgtctcaaggcgcgtccctccgctcacgttgtgcgttgcctctcccgctaaccgacgtgtcgtgtcgccctgcagacgtttgagggccactcgaactcggtcctccgggtcgacttcatgacccagggccagcagctcgtctcgtcgtcgtcggacgggctcgtcaagatctggaacattaaggacgaagagtgcgcggcctcgctcgacaaccacgaggacaagatctgggcgctcgccatcagcgaggacgagcagacgatcgtctcgggcgcggccgactcggtcgtcaccttctggaccgactgcacgcagaccgacgagcgcgaaaaggtcaacaagctcgagagcacgatcctcaagtgcgtctctcttcgtgtcggccctcgtctcgccttcgcccgctgaacctcctctgtctcgcatccccgcagcgagcaaaagttttcaaactatgtcaacctgaaggactacaagaatgcaatcttgctcgcgctggaaatgtcgcagcccggccggctgctctcgctcttcagctcggtccgttcaaaccggccgccggcggcctcgacgccgacattgcacgccttggccaagcctgcggccgacgactcgacgagcatcactggctcgctcgccgtcgacatggtcatcaagaacctgccggcgctcgacctcgtccggctcctcggacatatccgcgtctggaacgcgcgcgcaaagacgtcgcctgtcgcccagacggtcctccacgccatcctccgcctgcggacgtctgaggagatcgtcgccgccttcagcgcgatgaaggacctgccagcggctctggccacggctggcggtgatcggccagccaatccgcgcaacgcgcccgccgcgccggcgagcatcggcgagatcctcgacgccctcgtcccttacaccgagcgctactttgaccgggccgagcgcatggtccaggagagctacgtcctcgactttgccctgagcgagatggacggcggtcttttcggcggaagcgctgggctcgaagacctcgcacttggcgccgacgacgaggtcgacatgggcgccactggtgccgaggaggacgcctcgagtgaggaggagagcgaggaggaggacgccgagatgcaatgagccccccttcttccacctttgaccgccggctggccgttctgcagggagacgttcgttagattcattaacgaggcggaggagagatgcagagtccgggatgctagagcagcccctgctgccggagctggtacaacgaggcgaggaagacgaggaagagagcgagcaggagcagggccaccggcgtgttgtaggctgaacagacgcaagcgaccaagtgaggtcaatcgagggaggcgagcaaaagggggcagcagaaggcgggactgactggcgtcaaacgtcgacggaaccgcatagatgcggaccgtgttgtcggcgctggccgagcagagcaggctgccggccggattgaagcggagcgctgtcggcggaagctcgtgcgtgcgcaggatgcggagcagaggctgcggggcggggaggcgggcggcgtcagctccggaagcacggatgatgcacggaacaaagccggcgcaggactcaccccaaaggtcgttgcatcgacgatcccgacgctcaggtcggagcagccgaacgcgagccggctcccgcaggcgctcaggtcgacgaccgtcaccggctttgcggcgagcacccgcgtccgctcgagcgcaaacggcttctcactcgagccaaagtcaaacgaggcgacgtaggacttgcgcggaccgccgcgcttgctcggcggtggggcattgaggacggccaggagctggctcgccgtcgggcctcggccaaagcgggcggcgcggaacgacagcttggcctgggcggtgacgacgtcgcgcgagatcgaccggacctcctgaagattcgacgtgcccttctcttcgggcgcggtcaagccgtagatgcgaatcttctccgtgctcgtcacggcaaactggaagagggcggtgaggcgggcgtgcggggtcagccttcgaccgcgagaccagagggagagagcctcggacgcacaaatttgcccgactcgtcgaagtcgatgtcatacaggtcgcctgagccgagtcctggcaggtggattgcgttgaaggccggctggagcgacggataccggcggaccgacacctggttgtttgagatgccgacggcgacgaggctgtggtcgcgcgagaaggcgaccagtttctggaacaggggcgacatggtcgtcagtgatccggaagccccttcgtatcaggcagctggcgagactgacagggtacggatagtcgtccgtctcggagaacggagccgagaacgtcttggccgcgcggacgagcgagatcctgccggcatcacaggcggcctctatcgagcgtcagcgaacaacgcctgcgagttccgagcagcgcgggtatcctcgcgcatgcccgtcgtgtctaggagggagggggaggagggacgcacgcctcgtccgacacttcgaacagccggcagttgtcgttctgggcctgccggagctggtccgcggccgagttgacgccggcgacgagctccttcgtctgcgacaagtcagccaccggacacaagcgcaagcgatggaggggtcagacgcgggaatcgtccaggcaaaggagctggaaggacgggcgcacctcgaggttcacggcgatggccatcgggacatcctcgagcttgccgagctcatgctcggcgcgggtctcgagcgtcttgctcttgaggtcgacgcggcagagacgctagatgcagcgcagcatcggtgcaagtgtcagccagctcagtcgagctcgaactaggatgagaggccagttcgaaggcgctgatggggacgcgagcgcgaggacggacgagcttattggcgatgccggtccgagacgcgccgccgccgccgccgaggacgacgtcgcggtccgaggtgaaggcgagcgagtagacggggaaggccggcgtcgggcaagggaagtgttcggtgcgagtcatcgtgcgagagagaaggtgaagggttgctggtttagaggagcgaaggagggcgggaaggcgcgtcgtcgacgttcgacgcgctggcactgggctaactgcagacggccgaggccggatagcgttcgatgagttcggtcgctgcccaacattgggtacttcggtcgacaagccaaagcgccccaaaaagaacagggcgacaggaaccgaaaagcgcgcatcatcatccgcccagactaaactcccttctcgccttcactcgctctcggcgctcgacgaacgggcgagctttggcgggaccgcgctcgagtcgtggctcagaggcgacggcgtcgccggtgcattgggccctggcgagaacttcttgacagctgcagcagcggctgacgaccgggcgttcggcgccgggttgaagtggccgcactttgggcacttgtactctgttcgaggccgggcgatcagaggtcagcgagtgggcgataggaacaacagcggccggacgtacgcgtgtcgccccagcgcttggcgtcgacgaggccgttccacgcaaagcatttttcgcagacgagcgcatacttgctcatgtcgcccccggcggcgccggccgcgcccggctcctcgccgaggacggcgtctgcgagtcggtcgtaccactgcttgcggggcggggtcggcgggaggacaggcacggggaagggcgagccgggcgcgctgaagccagcaggaccggccgcgacgagtggcgagccggccgataacgtcgatgaccggggaggcgtcaccgccgccgcactgggcgaaggcgaaccgggcgaagctggaggcgcgcgcgggtcgacaggcggctggaaggcccgccggcggaagttggcagcgttctgcgcaccctgctggttgacctggacagaagacgcttgatcagccgactcgaccttccaagcggatcagcctcctcaaggcttgcttaccttcggcgtctcgtcgtacttctcgagcaggttcttcgtcgagtagtagttggacttggtcttgatgtcttcgatcgtcgtccgctgcttggcacggagctcgcgcaggtgcttctctgcaggacgagacgggtcgtcaagacaagacaatgggacgctgccgaggctcgagtgactcgccgacgcaccctcgaatccttcctgccgagtgtaccagagcttgacgacgcggcggatgtagtagatgctgctcgcagaaagcgggaagagggtggtcagcttctcgactcaacggaagccatcagacaagcagggacgcacccgacgggtccaacgagagccgggagggcaagcaggacgaggacaccaagccggacgagctcgttctctccctcctcctcgccaagcagctcatcttcgcctcccgtccagccaagaagagccggcagccgagcaagcggcgccagcgcgtcaaaccaccagagggcggcgtagaggagccagaggccgatggcgtagagtgtaaaggcgagcgtcgtccggcgttcgcggagcttgatctcggagagccgctgctgacgctcttggatctggagcgagaggctctggaggagcgcctcgtagtcctgcttgggcttctggcgagcagagaaggcgagcgagtcgtcatcagcttgcaggtcgggagccgaccgatcgccctgcccgctcgctggcctcgagacgcgccaacagctcggagagcaacctgcagactcacctctttgaagagccagctccagatcgccatctcggaaaggacagtcagattgaaggcgagagagaggaaagagcaagatggacgtcagtagcgtcctgccctcgaatctcgaaggtcagctcgagccggcgcgcagggacccctccgacgtcgaccaccgcccacaagaccctccctcccttccttccggcaacagcgctctcggcaaggtcgaacaccgccggacctactgcggccatgccgctccgatcagcagcaggcctcgagctccggacgctgagggtgcgaacggccgccgcctcgagtcaggccgcgcgcgtcgtccggctcccgaccgagctcgtcgtccgcaggccgttcgctatctcgaccttacggcgaacggcgcaggaggcggtcaaaccggccgatgctgagccttacaggccgtcggtccgccatctaaagctcgagggccaggcgatcgtcacagagggtgcgttccactcgtcctgccggtcgcgtccgagagttgccatattgaccgcctgcgccttcgccctctctgatcgctcgtagacccgacgcagcctcggattaatccggtcgggatccagctcctctctcagtcgttccacgagcagatcttcccgggcgcctcgcgcaagacgcccgacatcatcgcggtcgagacgtcgatcgcccacctccgggcaaacgagctcctcaagttggcacctccggtccaaccgcccattgactttccgctgccgccactaatgggcgggaacattgacgagcactttcataacatgggtctactcgtacgtccgggcgtttgtgcgtacgaccgcgttactcctgcgcgagatcactgagacgccctctactctccaccctcttctaccccgcaggaggccgagccgtacctctcaatggcagagcagttcgctgcgacgccgccgctgcctttgccaaagcgattctcgcacgcctcgggctggacgcgctacgaccccgcgacgggcgaggcgacggccgtcccttacccagagagcgagtcgatgctcacgttcgatgtcgaggtcctctacaagatcaacccgtatccaatcatggcggccgccatgtcgccgacgcactggtacacgtggctctcgccctggctgctgggcgagtcgaccgagcaggagcacctctgcccactcggcccagccgacagcgagcgcatcattgtcggtcacaacgttggctacgatcggatccgcgtaaaggaagagtactctttggccgggagcaagaaccgcttcctcgacacaatgtcgtttcactcggcctcgcagggcgtctcggccccgcagcgcggtgcctggcggctccaccagaagacgctcgacgagactgagcgcttgcgtgttgaacggctcgaggcgctcgagtccgaggccgaatcgctccgcgagcgaatcgccgagggccagaccgaggaggtcattgagacgactgagcaggtctcgggcgacgattacgactatagcgccggcgtcatgttccccgaggtgaccgagaagacggtcctcgtcacgcgcaacctcgccgaccggctacggagggtcgaggccgacctcgttgatattccgctgccggtcgctcaggcgcagcccaacaaacgcttcctcgcgctcgacgtcttcggcgaaaagacggacgccgagccagagtacgaggaggcgtccgacgccgaggtggcctcggccgaccgcggcattcggacctgggaggacctgacggccatgtcgtcgctcgaagaggtcttcaagctccattttcccggcgagacgatcaacaagacgacgcgtaacgcctttgcggccgaagaccggtcgtttatcctcgaagaccttcagaacctcattcactactgcgcctctgatgtccatgcgacgcaccgcgtctactcgcggacgctgccccgctaccggcggctctgcccgtcgccggcctcgtttgctggcatgcttgttatgggcagcgcctttctgcccgtcaacaagtcgtgggaccgctacgtccagtcgtccgaggcaaagtatctcgagctcgacggcaggatccgccagaagctcgcctcgctcgccgagagcgcgcgcgagcgctggacgcctccgccggccgacagcaaggcggccggcctcagcccggccgaggttgcccggctggtttgtccggacgagctcaaggacgacccgtatctcagccagctcaactggacaccgaagaaggcccggcacttcaagtgggcgacgctcaagagcatgtcgcggacgggcgacgacgagcagccagccgagtttggcgaggacggcgctctgaagccgcgggttgctgctcctggcggcagtaccacgaccaagtcgggcggcgtcttgccaaagtcaaggatggagctcgcccagagcaaggtcatccccaactcgatcggcctctgctaccgtggctgcccggtcgtatggtcggtcgagcacggctggatctacaaacgcgacccggccgatccggcagcggccgcgatggagccagcatcggacgccgtccgcttcagcgacgagcgcgatgcgttcctccgctcgcaggatcgcgggaccgaccgcaagaagcgcgtaacgttccaccgcctgccaaacccggccaagtcgacgaaagtgacgcgctgcctcggcaaggccttcctcggcaagtttggccgcgacctctcgtgcgaggacgacgagctgctgcagatgatggtcgccgaggccgactggcaagacattgaggaccggctccgcgaccggctcaagggtagcggcatgctcagcggcctccagagtacgtccgtctctcgcaagtctgacccaggggaggctcgcgctgacgacactcggcctctcacagccgccgagcgcacggcagacacgcctaccgagcagccgcgcactgacgttgacaagccgcttgccgccaaaccgaccgcgccgacccgggtcgacctgcctggctcgttcgatgcgctttcaaaagacaaggtgctcccggtcgccgtcgacctccgcttcgacggccacccgattgtcttttccttcgagcacggctacgtctttaggctggacgcggcgacgctcgccgactcagagagcacaatgccgcccgaagagccggcgcttgtcttcaaggaggcgcgcgactcgccgctttcacgggccgaccgccagacggcaatgtttcaaaagctgccggtgacaggcaaggccgcaaaggtgacgcgctgtctcggcaaggtcttcgtcaagcgatacgaggaccggctctcgtccgacgtccccggcctgcttgccggcatcgtcgatggatctgactgggcgaccgtcgtcgccgagctcaagacgtccctgtcgaagaagggtctgctgggcacagcgcaatcgacgcgtaagtccctccgggcctcctttgccgcctgtcgcgacgactgacagacaaattttttcagctgccgtcagcgaaagcccaacttctgccgagtcgagctgtgagtctgagaggatttcgtcggctgaggtatcacttgcagcaactgactctccattcgcgcagcctcgtcgccttcagacacctctccccctccgaagccggccgccgaggtcgtccgcgactacatgacggcctcggcttcggcccggaaagccgattggtggccgcagtggtaccacgagctctttgcgcccaacgtcaaccgaccttgggacatgatgaatttcagcgtccgcaacacggtcgcgacgctcctcctccaactcagctggcgcggctatccgctcttcaagtcacgccagtacggctgggtcttccggatgccggccgccgaggccgacgtcgaggacgaggaccgctcacgccggctcctcttcagcgccggccagcaggcggcggccgagcgcgacgaggaggccgagctcgaggtcctcggcgagaaacggccggccggcggtgccgccaagaagctcaatccggacctcgcgctgttcgaggcctcggttgcgggcaagttcgtctttttccaggtgccgcacccgaacggcgagggcaacaatgtcggctacgtcacctcgaagccgtttatcaagtttatcgaggacgagacgctcacgagcgtctacccactcgccaaggaagcgatgcagatgaacgtcgcctgtagctactggatctcggtccgcgagcgcgtcgtcgagcagctcgcgatccgccagtcggccgccatgccgatgggcttcccaacctcgacctcgaccacagaggcgccggcgtccgcgctggccggctcgtcactcgcggtcggcccggccgacaatgaccagggttacggcgtcatccttccgcaagtgatcgtcatggggaccatcactcggcgggcgattgaaaagacgtggctgacggcgtccaacgcaaaaaagaatcgggtcgggtccgagctcaaggcgatgatccaggcgccggaaggcttcaacattgtcggtgccgacgtcgactcggaggagctctggatcgcctcgctcctcggcgacgctcagctcggcatgcacggcgcctcggcgatcggctggatgacgctcgaggggaccaaggcccaggggaccgacgtccactcaaagacggcctcgatcgtcaacatcacgcgcgacatggccaaagtcttcaactattcgcgcatctatggcgcgggagtggcgaacgcgacccggcttctgctcgacggcatgaaggagcccgaccaggagcacgccgaggcggccgcccggaggctctacctctcgaccaagggcgaccgggtcccgcgcaagtcgcgcgagttccacgccttctggtttggcgggagcgagtcgtacctgttcaactcgatcgagcaggttgcgcgctcgcgccggccgacgacgcccgcccttggctgcggcgtgacggcggcgttgcgcgaagaattcctgacgaacaaggaggaccacatgacgtcgcgcatcaattgggtcgtccagtcgtccggcgtcgactacctccacctcctgatcgtcgccgtcaaccggctctgcaagctctacgcgatcgacgcccgctacctcctctcggtccacgacgaggtccgctacctctgccgcgaggccgaccgctatcggctcgcgctcgcgctccagatcgccaacctctggacgcgctcgctctttgcgcgcaagctcgggatggaggacctcccgcagggctgtgcctttttcagcgaggtcgacgtcgacaaggtgctccggaaggaggtcacgatgccgtgcgtgacgccgtcgaacccggagccgatcgcgccgggcgaggccctctcgatcggccaggtgctcgacaagacggcggcttcgctctttgccgacggccggccgagctcagacgtcgttcacccggccctgccctcctcatcctcggcctcctcgtcgggcctcttcccacctcggccgtaccagaaccgcgcctccgccctctccgccgcctcctcctcctcctcctcctcctcgtccgctcctagcctaaacacccacatccgcgccgacccgacccagctcgagcgctggcgggtctaaggaaggcctggacatctagggtgcgaggggtgggtagggaggggttgcgagggttctgggtagcgcgtgagaggatgggggtaagcagaagtctggggaggggtggcaaggacacgaggatgcaagagcataggagggaggagagggtaagagatggaagatgcaggtgtgagatgagaagaaagggcgaagagggacgacgaggcgtgtgcgtggaaaggatgcaagtgtgtgtgtgtgttgagtgcgagaagcaatgcagagaaaagctttgagggccggcggggtcgaggggcaggagctgtcaatggtcgccccattcaaagcagacctcggtctgctcggcgaccggctgatcgtacccgacggctggcgagtgcgagaccgattcggcgtgatagtaggcgacgtgcggatgagcaggcgggtagtctgcggcagcgtaggtcgacgtcatggcgagcgacgagcccgtgtacgaccgtgtcctcgggaagccggcgccaccggtcacgccgccggctggcgaggccaggcgagaggggacggccgagtggctcggcgacgctgacagcggtccaggatggtactcggccggcgggccagacgagattgcaggaccggcagcggacccgctaaggatgaaagtcgggtgttcgaggccgggaggtagatcgccggggtcctcggccggatagctgccgtacgcgctggcgtagtggaccgacccatcggcggcgaagacagggtttgcgtctacctggataggaggaggcgcaaaggcaggcgccatcatcgccccttgtggcgggtacggctgctgctgtgactggagatggtcggcaaagtactgctgctggccgtgcgagtgctgaatctgccggttcggggcgtgtgagaaccaagcgttatcggcaaaagattcgcgctgatagttcgacggcgagtgcaggccagactggctgtgcaagcgctgatggtgtcgccgggcctcaaagggcgcggccggcggtgggggttcacttggcgaggccgagacgtacgaggtcgtcgcgataccgagcgagccttcgactgaagccggcgtcgccgggcccgagatggacccgagtgggaacgagatggatcgctgagggagccctcggtggccagccgaggaagacggcgtgagcgggctgaggcccggccggttaggcgtcaacttggccggcgtcggtgcgagcgacacgttctccatgctgctcatcatcgcgagcgattccgaccggccgagctggccggcgcggcgaggaagaggctgagcaatgtagtgagagtcctcgagaacggtcggcagcgccggcacgccgccgcgcaggctgacggacgacgacgaccgcttgcgggccgtgtactcgaagccttccttgagcgtcggagccgagccggtggccggcgagggagcaggcgaattggccgtcgaaggcgcagcggacgatgccgacgacgacccggccgtcatcgggaagacccgcttcacaggcgacgaccggcgggaggttggtgccgagggcgtgccttctgagctgctgccttgaccgtgcctgaagaggtcatgccgggccttgaagccgtcaagccagcccgatgaggccttgaacttctccgacggccagccgagcgaggcagcgatgctgagcgcttgctcctttatctcgaggtcgacagggtgaggggatccgttggcaatcagggcatgtagccagaccgtcagcggcccttcaagctcgagaaagcgcgtgatactggagaggaagagagagaaaaagagcacgtcagcaaatccagagacgccagagccgaagcgccaactcgacacgcacggaacggccgaaggggcgctcaaggcctccttgcgccgctcggggagccaggcggccgggttcatccagcgcgccgtgtctttgaggatcttgctgacggtgctccgctcgacgccgaatcgcgcagcgaggtcgtcttgccggatggtgggcgtctcgagcttgagcgtgcagatctcctttttctgcgcgtccgtcaacttagccttgttgcgctgcgctgccgaccggtcgccggcgatgacgagcttgctcgtgatcttgccgcttcggggagttggcaccttggcgggtccgaaggagaatgatcccgccgagctcccaggcgcggtgagcgagggcgtcgacgtcgcccggttccggaagtggtagggcgaggaccggacggcacgagtcgaaggcatggcgtggtagccctgcggcgccgacgccgtgctcgccgcagacgagtaggtcgagatgaccgaggcggccgagggcgaggtcgagcgcgagacacagtttctaaaggacgaagcggccgaggacggcggcgtcgtaatcggataggaccaggcagacgagagcgaggtcgacatgtctggcggtcggctgttgaacgggtaaaggtcgttctgcgggccgccgctgggctgaccaaagccgccgccattatcgccgccgtcgtacgaagggtagggcgagagctcgaccgagctcgtcgtcccagagtgaccgacgctcactgcgggcgagtgctggccgccgaacgagccctcgacccggaaaactggcgactcgagcggtgacggcaggtaggcgctgtcgctcgggctaaactggacggtctgcgcgtggagctgctgacgcgtgcgagcgatgtacgggggcggtgcatggtgcgggtgggcacctcgtggatagccttgaacgatcggtgactgcgaagttggcgggtagccgccagtgctctgcatctgggccggcgcagagcccccaccatgaccgggtggaggggcgggcgagtagcagtagccgacacagggctgaggcgactgaagcgcaaaggcgaaaggggacgttagtcagcatgggcggcgatgacgataggacccgcccgtcgacgtacgtggatgccgaggccctgcatggactcggcgacgtgctcggccgacgggtacggttgccggggcaggtcggggtcaccgttcgcatcggccgaccaggacatcctgcaatgtgagaacgagcgagtaagatcagccgcaggccgggtcaggcaggcagagctctgggacggacgagggacgaggccgaggggatgcgcagcggacacgaccgagctttggcgcagctgacgagagcgagctcgtgcaacctgtcaaaggcaaggccaagagcgggacgatcagcttttcggcttcaggcgagctcgcagtgtcccggccaagcgactggcagcagcgatggcgcacagaggcgttcagggtggtccccactttttgcccaaaccaagcaaagcgtggcggcgagacctccggctagagggctcgaagccaaggtcgccgggcgcgcgcgagggctgccgacctgggccagtagcacctctctccagtctgctgtcggcaggtgaggaggaaggggaaggccgacctggcccgagcgagcagggcaaggatgtgaagggaagaaggaggggacgaacgggatcacacgagggcggaggagggtttggccggcagcaaagacgccgagagtcgagcgaggcgagaaagccagtcgcgcggacggccggaaagcagcctctgagcgggagaagacgagcttcccagagaccgagcgacgacagcgaccggctgagctaaagagcagacgaggcaggcgggctcatcagcgtctcgtcgagctacctgctgcctggcttggtcaagtgggaggacggcgaggtcggtcgaggagagggcatggaattttctggcgtggtacgcaccggccaggcgagcgaacttccggctgggcggtgaggcgaagagctgcttgcttgagctgctggaacccacaaacgaagttgcgacaagcgaatgaggaggcaggcaggggagctggtgctctcggcttgccgctcggggttgaccgtgatcgttgctgagagaacgggccaggtccggggagggggagagaacgagcgagcacgagaggagagatgctgctcggccgcccgaaacgagatcgcaccggacgaaccaaactcccttggccgccttgccgccaccctcatccgagcaagccgacgggacccaaggagcttcccaggatgcccgagcagctcagcctgccagccggtgccgctcggtcgtcgcccgatccttatggcgacgactgggacgccggcttcctcgacgccgtcgtgacgctgctcgacgaccggccgtcggcctcgcccgcagcaccacccgtcccttcggcctcgatgccaagaggaccagccggagcaggcgggccagctgcctctgctgagatcatgccagccgccatgtcaccggtcattgttgcagggcctcgtccgctggtcaggcacgtcgagctcgagctcgacgtggacgaggccgacgcgcagcgcaaccggccgtcggctgaaggatccagagacgactcaggagcggacgacatggtcgtcgacgtcgttgcatcgggcgagtcaacaaggtgcgtcatcttgctcggcttgtgcgactggatggcggtcctgacgctcgccttcccggccgtcgccccctcctccctgtcgccacgcccctccgcgcagcacgacgcccgagccgcccaagtcgctcttccagctcttccgctcgcgtcgaggctacttttcagtcaccgacctctgtgcgccggtctggtgcgaggcgcggcccttccagtttcgtgaggctgcccttcccggaagcgctgaccctctttcgcacgtcgcaggtccagtacgactacggcctccgcggcaaacgcttcttgcccgtcgccgagcggccaaagacgttcctctcggcccgcgggaaggcgatcacgcccaacgtcgagcaggcgacagtcaatgccaagattatggacgccgggagcgtcatccaccagcggctcgagaaggagatccatccagtcgaggtcaaggtcgacgtgacgacgcgcgaggaacgctgggcgctcaggctgctgaacatgctcaccgcagtcgaggccctgattgagctcggtatctgcgtgcgtgaatggtccgttgcactctgatgagctgtataggcctgagctgacactgctcttgacggcgctcggtcaacgcagcgcgagatgccggtcatgggcttcatcaagggccactttgtcgtcggcatcgtcgtacgtccgccgaggtgagcagaggcttcccttacgcgtgctaatcacctcgactgataccccctccaggacgagattcagcgccggccgctcgcccccgcttcgacattggtgtcgtccttgtcgcctgccgagacggccgcctcgcaggccgccggggccggttcacaggctacaagctctcagtgggaagcgaaacgccttcaagctcgctcgtccccgcgcaaaaaggttgccgcgaccgcgccagtcgttcccaagacgacgcccatcacaagcttcttccggcctaaagacaatgaacccatcgtgcttgacgacgacggcgaggataatgtcgctgcagtcctcgatgcgtcgtcggagtcatcacaagacgctctcgtagagcctgcagctggcctgccccatgacttgacgatcgattccgcgacggtaccggccagcaggtcctcatccggcgtcaccgacaccgtacaagtcgtcacaccatcctcgcagccgacgcatgccctcttcgtcagcgactcgaagacccgtcggtcgtacagtctcccgcgtgatgacgccgctctgtcgggtcagtctcctctcgagcatgccctacgtcttcagtagcccagctaaccccttccgcgctgccccatcctacaggtcgcctgcagtgccagctgtacaagcttctgctggacgaatcacttgccccgctgcgctcgccatcgtcgctgtccagccacttaccggccgagctcgcgacctctgtgctctcgcgcgtcttttcccagtttgaccttgacccgaccgcccgtctctcggacggcttctgcgcgcaagcgcagacgctcattgacggcaactcgatcaagatcgactggaggggcgaccacaatctgacgctcgagtcgctcgctcgctgctgggacgtctcggtcgaccggcttggcatcgaccgctgcaagggcattgacgacgagctccagcttgtctatcgctaccagagccccgtcagcaagccgaccgggtccggcaagggcacgggcaagcgtaaatcccggcgggccaaagagtcggcagtgccttcgcaacctacccagacggaggagaaccaacagctccagctcgccatccaggcttcgctggcctacgattcaagcggcggtgtagccttgccagcagaagcagccgccgactcgacgcagccgaccgctgatgaatcggacgacgaccagcttcagctcgcgatccggatgtcgctcgctgccgtcgacagcggcccacccgtcacgccgctgccgaccgaggagccgcatctggtccctgtatcaccctcagccaacgctgctaaaccggcttcggtcgcccggtcgccgcagccgggagcatatcgcgctgtcttagcagagtcgtccatcgaacgaatcgacgatggcccggtcgaggtgcccgagggcgcattcgacccgccgcctgcaccgctcgtcctggacaagccgacgccgacagccagctctacgccgctcggagcgacctcgagcgttgccatcgtcgagggcatgctctctggcacctccaagcctgcggccttgctcagcaaggcggagaaggtcgccgagctgatgcggctcaggctggtcgaactcaaggtgcttgcgcgcaaggagggccagcccgactggggcgccaaaaacgtcctcgccaaccgcatcttcaaggctcgagccgagcgggacaagaacggggaggaccggagcgatccagctcaggcaccttcgccagagaagccggccaagcggtcgaaggttggcgctgctgtcgacaagctcgcaccggctgctgcgccctcgacggacagcttctttgcgcctccacccggtcccttgcgctcgaaggccgacgacgacatcatcggtgtcaagactttccggttcgaggcggccgagctcgacgcgcacctcgaacacgtcctcgccttctggctcggcgagcgcgagccgatcggcgtcccgctcgatgagacgttcaagtgcaattcgtgcgagctgcgcgagtcgtgcgagtggcgggcagaggaggccgaccggatctgggcagcccgtacccaggcgagggccggggcgtcggcggtctgagggggctgcgaagcgatgactctgtacttgctgactgtaagcgacgctgagggcggggatggcagcgaggcttggcgttttgcgcctcgcttagggactgtcgcgagaagggccgggcgcccgtcgtccttcgccgccggaacacttcgaccgtcgcagcacctgtagcgagcgatcttatggaggcacgcgagcaggcccctcttcgtctctcttcgcacttatcaggcggcttggtctcctgcgccgggacctcaccagaacgccggggcggccggctccgaaaaggggggatttcggagcgatcgaaaagtgagccgcgcggagctcgacgagggttcacaccagccctcgtagagctcggaggagcagacaacgtcctgaggacggggcgtcgagcaaggtagcgaggatggacggcagagctgggcgaggctgatctggcccggcggccggctgcctcgcttcgtagcagtcgctcagttgtggggcgagtcggcctcgtacgagtcaagccgagagtcgctacgctgccgacgtcgccgggctgctccagcctgctgcacgccgctccccccggtcgtcaaaggcccttttgcacgacagagctccgatgcgacgaccatcgcccacctaccctctcttccgacggcactcagcaagatgacagccagccctggcgaacccaagccgccggccgacggcttcgatgctgccgtcggctctcctccgccctcaggccaattcgccgcggccagagccggtcgttcggcgacgctgcatcccgacctcaagacggcccgcgtcttccctgggccgctctagtacgtgccgcctcgagcgggccttgctcacagctggcgagccggcagcccttgctcggcgccggtctgatcggctgacgccgcgactcgcccggtgcctcgcagcttcctctcgttcgcgacgacgagcgacctcctcgtctatgccgtcggatcgctagcggcgatgtgcacctcgctcccgttcatcagcatcgacgtcagttccagctctgtagctgccagccttgtcgatcggggctgacattgcgtccacctgctgccggcctcgcccttgactacaactcctcaaccctcaccctccgacgtcacctcaccctccacctctaatcaccggtcaacctcctttcgaactgattccgcttccagctcacgtacggccactggacgtctgcgcttgtccctgtcgtcggtgtcgcgacgcccgagaacatccgggcggtctcgcgcgaggtcgccctcatctcgatcggcacgacgctcggcatgctcatctttgccgccaccttctacttttgctgtgggtcccggtcatcgactgctctttgggatcgctttccgttctggctttcttcaaatgttcagcgttgctagccctcggccgttggtgctgactcgacctccacttccgcgtgcgcagtcggcctcgcgtctgcccgagtaaccgctcggatgcgctacgcctacctcgccgccgtcttgagtcagccggcgacgtacttcgagacggttggcagcggtgaggtcgcgagtcgcatgtcgcgcgacatcgttctcgtctcaaccggcgtcggcgagaagctcggctttgccttctggtcggtcggggccatcatcaccggcgtcatcgtctcggtctgggcggctcccaggattggcggcgtcctcttctcgatcttgcccttctgcgtcattagtttcggtctcgccggctggctcgcgtccgctgcgtcggcccggatctccaaggctgagggcgacgccgcgacgttccttgaacaggtcctgagctcgtgccggacggtcaaggtcctcaaggctcaggacgcactcgtcgccgtttacgacaagtacctcgaagccgtgagtccgttagccgtgctgcagcgccaggcgttaaacttctccgctgattcaatccccgaccgcccctctagatcgagaaagatggctcgttcctcgctgtatccgagggtgtcacatacggtgtctcatatttcggcgtgttcaccgcgtattctctagccttctggtacggcgggcaacgggtcgccttccatggccaggacaccggaagactcgtcagtgagtacggcgaacggctcaggtgatatccgaaccttccagcagctcacccaaccttgcctccccttaatccagcaagtttcttcagcatcttcaacgccctgtttgcggttgtgaacctgctgcctcacctgctcacgttgagtgaggcgatcaaggcgcagggccggatcaagctcgagatcgagcgcctctcgtcaattgacccccgcagcgagcagggtctgacgaccttcgagacgctcgccggcgagaagcctaacggcatcggccgccacatcgaggtccgcaacgtcacgtttgagttcccgtcgcgcccgggcatgaaggcgctcgacgacgtctcgctcaccatcgagcgcggcaaggtcacggcactcgtcggacgtgcgtcgctggccttcgccatccccacctctagcctccgctaacactttgatgtctctcgaacccagattctggctctggcaagtcgaccgtcaccgcattgctcttgcggcagtacgacctggccgagccggcgtcgacgacgagcaacattttcatggacggcgtcccaatctcggcgcttcggacttccttcctacggcagcagatcgctatggtgtctcaggatccgatgctctcgaccggcaccgttctcgacaatgtcgccgccggcctgaccggcacgccgtacgagcgcctgatcgatggcagcaatgacgccgttgtccgcgagctctgccaggacgcgctcgagaaggctcaggcctgggactttgtctcgcgcctccccgacggcatcgattcggtcgtcagcggtgcccgaaccggcgtcctctccggcggtcagcggcagcggctcgctgtcgcccgtgctctgtaagcccgccacctctgtctcgctcgcggcctgtcgctctttcgctaatcaccgccgccctcgctgcgttttgcgcagcgtccgcaaggcgtccatactcgtcatcgacgagggcacgtcggctctcgattcctctagcgaggcactcctgatgatgcgcatcgccaaagagcagcgcgatctcggcatgacagtcatcctgattgcgcaccgcctctcgaccgtcaaacacgccgatacaatctatgtcatgggcgcagggcacgtcctcgaacagggcaaccaccagtcgctcgaggccgcccacggcgagtactggaagatgctccgttcgtcctgcttggccgactgatctggcatctcctgcaatcgacgcatcgctgatcttctctgacgccccttttgatgcagagctcagccagggcattctgcttgacgacgaagaggatacgtcggccgcgggacccgtcgagacggacgccatctcgctgcgcacctcggtcaccgcttccctctccaacgtggagggcgtcgtcgagaaggtcgtcaacccagtcctgatcaagcctgcgactcggtcgccggaggctgaggaggccgagattggcttggccaccgagggcaagaaccagccgtcgcgcttcaggagcttcctctcgtacccgcttcggcgccgccgctggctcatcccaggcgtcctcagcgctctgtgcatcggcgccgccttcccactctcgggtacgtcgactgcatttgccgtatccagctctgcccccaatgcatcgactgacggtcgccacttccttgtgcaggctggctcctcggcaaggtcgttcacgcctttgacctgcccgagccgaacgaggtctcgagtcggactcgcttctttgccctcatgttcaccgtcatcgccattgcttgcgccctcatctcccttgtcgaggcctggtgcctggtcaacggtgcgcagcgcgtcacgcgtgaacttcgcagggaaggcgcccacgctgtactccgccaggtgcgtgcctgccagacttctgtgcgatcgtcggaaccaagtgactgaccgctgcctttcttttggcccttaggacattgcttggtttgaaggccccgaccagggcgcaggcgctctcaccgctggtgcatatgagcttttgcagcccttcctgttcaaagtccagcagctgaccgccacctaacctgcagccatcggtaaaaacccgtcggaggcctcggtaccgctcggcatggtcggcggtcaagccatctcctcgtcggccaacttcctcggatctttgatccttggctttgtcctcagctgggctctcctgctcgtcggcttagcgccgctgctgctgctcgctcccatcgcctactgtgcgtttcccgatcgccttccactcgcttcttagagctcagaagcggacgctgaaccccacccctccctttctcatcacagacgagatcaaattcggcgcaatgtacgaggaggaggcgggcaagccgatcgaccgggctgcgtcctttggctcggaggccgtcgactcgatcaagactgtcgcggctttcggccaggagctgcaaatcctgcgcaccttgacaaagctctcggagcccaaccacaagcagcgcaacaggctcgcctttgccgcggcgctctttttcggcctgtcgcaggcgatcccgtgcgtgatcgtcgcgttgatctacttctacggcggcaagcgttacgccgacggcagcgacgatctcacaactgtgtacgccctttttgaggcatgtatgatcgcaagcttcgcgctatcgcgcatattcagcttctctggcgacttttgtgggtgcttctggcctgcgcgcgactcctgacggccacctttactgacccgccgactcccctgtcttgcagcccggtccgtccacggcttcaagagcatctccgcctggaaggagcgcaggccagcgttcgctacccttgcacccaaggccgatgctcagcagcggacgcccggcaggggcccagcgacgatcgagattgagaacctaacgttcgcatatccgagccggcccggcaagctcgccatctcggacctgtcactcacgatccgcgcgggcgagaagctggcgctatgcgggccttcgggcggaggcaagagctcggtgctcgcatgcattgctcgcttctatgagccgacgtcgggcaccgtcaaggtcagcggtgtcgacgtccggtcgctgtcgctcgacgagcactggggaagcatcgccctcgtcgcgcaggacgcctcgctctacggtggaacggtgcgttccccttccttctttccttccctactctcgaattgcgactgacgacctgttctcttctgacttctcaggttcgcttcaacctgaccctcggcctgccctacaaggcgaccgacgcacagatccaacgcgcatgcgagcaggcgcggatttgggagttcatccagacactcgacaacggcgtggacaccgagctcggcctcaagggcctcaacttgagtggtggccagcggcaggtccgtcgtcactctcgcgcccgacacttccatccggcgcgcgctgaccgagctacctgctcgcttcggcctttttccagcgcctgtgcatcgcccgtgcgctcctccgcgaggccaagatcctcctgctcgacgaagcaacgagcgcgcttgacaacgagagcgagtcactcgtccaggaggcgctcgaccgtgcttccgtcggccggacgaccgtcgtcattgcgcaccgggtgagtcctgcccctctcgccctttgccagacgctgcctgctgacgccctcacccgttgcagctctcgacaatcagaaatgccagtaggatcgctgtggttgaagaggggagaattgttgagattggctcgcacgaggagctgatgcgcaaggccggccgttacgtcgacctgatcgctgcccagctctagagcttcgtctcgccttccctgtacttagcgcccagcctctgccggccgtctccatagccctcaattgtcaatcttagatgcacgccgcctcacgtggtgcccaccaggtcgcaggggagagatctaggcacaaggagataggctcatctagagtgggccgcccttgtcccccgtcgctgctgctggcgtcacgtctgcagcagcagcctggttgagaggggccggagacggcaggtctactgcagccttggctcgagggctgacatgcccgccgctcgtccggcgcggactcgccttgcgcggcggctggttggacctggccttcttcgaccgaggctgctgcttctcaccggtcgcctgcggcttgagcccgaactcgacgccgctagtcgaagtcgcgccggcatccttcgcgggccgggtaacgatcgcgccgccatcgttcgttggccgggtggcggcgttggccgccttccgggccgctcgcttctcaaccttgctctgcccagcgccgccgtcagcgctaacgacgctcttgcccgtggccgagtcggagtcggacccttcgtcgtcctgctgctcttcaaacagggcggcgatcgcgtcggtgtagagcggcaacttccacatgtcgccgattgcgaccgacacgaagtcggaggcgagcgcgacgacctgcgtctgggcaaaggccttgtcctcggccgaaagccaagggtcgagcggcgagacggtcgagagcgggtttttggggtagcgctgcgagaagtgggtgaggagcgtgtggcgcgagcgcatcctacgcgaggcgacaatacgtaagccaggcggcttgtcgtcagcttctcgtcgctggcggcagcagacttgaagaagagacgcaccggcgaccgacattgaccgcttgcgagaacgtgctgtggcccttgtcacgcgcgagctcgaagcacgactttggaagcggccggttggcgccgctcgaccgcgcccgctggcgctcaatctcgaggacggcgaggctctcaggcgtgtcgtcggcgagcgttgcctcgtgaatgaggagcgtcgcaccctggccggcatggacgagcgcctcgcacggcttggtgtcgcccgagtagctgcgatggcaaagccaggttgatcagctatggtcgagacaggcggcgcagaacagcctacgcacacaatcttccagccatcgcggtggcccaggacgccgccgaagcacgagtgaccgcggtggtcgacctggcaggtctcgaactgggagagaccggtcgcctgctcgatccacgcaatgttctcgcgcaggctgtcggagggcacacgcccgggcttgggcggctgcttgatgtcccagttgtcgacgaaacggagccggtcgaggccgacgtcggcaaagtcggcgacctcgcgcagctggatcagcagccggtgcgagccgacgagcgtcacctggttgtcggctgtcgtgtgctgcaagtggacgaggcgcggcggcgtcagcttgcccatcgcggttcgaacaaggagagccgaggagagcgacccacctctgtccggaagcggaggacgttcacgaggcccgagtggtggtcggcatgcaggtgcgagatgaagatgaccttgaggttgcggacgagctcgacgacgccagtcgggccgtacagtcgagcaagctggccgagagtgccctcgcctgcgtcgagcaagacgcccccatgcccagggatctcgaggtgggtcgcgctcactgagaacgagcgatgaagcgtcagctaggaggtcgaagctgcgagctccaagaaccagggggctcgagcgcaccgttgcggtactttgacggaatgctgctacccgtgccgagtgcggtgacgacaatgtcatcgcccgcctgccgttcgcccttggtctgcgcgagcttggccacctttgctcgggccttacggacctcagcagtgaaggccgggattgtcttgtcaaagcgatcgaaaagctcctgttccgacaggttgacaaggcgctcgatgccctcgtggagcgcattggggaagccgcgagagaaggccatccgcggaatgaccggctgctttcgcggagccggcaagatgtcgatcttttggagcggcaggatcggccagacctttgtctcgccgaccggcttgtgtggcggctgtatgtcgcactgcatccgcttgaagatcgaagggtcgatgagcgacagcgaggccgtcgagatggccgacgagagcgggttgaggtgattgttggcgagctttgggtcgcccgacaggtgctgcgtgagaagaaggagaggtgcaagccgttagcacgaccgcggcgggttgcagggagcggctctgcgctatgcaactcacgacgacgtccttgccaaacttggccatccaagcctggtagcgggcgtcggcccagacgcaagtcttgtgccacatgacgtggaccggccggacctcgtcgtcgtcgctgccgaaccagcggcgccagagggccgtctcgacaagcgagtcgatgtaggcctcggacgggcagttgacgatgacgatcgcgctcgccttggtgcccgcgccgagaatctgctcgggccggacctcgacctcggccccggtcatcgggtccgtcacgaaaatcttgttgcccgacgtgagctcggagatccgggctcgcggtacgccgagtgcgtccgacttttttacgtctacccggccgcgcttctcgggcccgagcataacgtacgatagccggacgtcgttctcgacccgcgccaaggcgggcatgaccgcgttcgcattgtaggcctggctggccgcgccgacgccgagtaacgggagctcgggtgggcgcaatgccgtcaccgaggacgagcggaacatgccctcgagaagagcacgcgtcccgttggccgagtgggccggatgaagcctaaagtatggctgagcggcgtcggtcagcgtcggcgggccctgcggacgaacgaccgggaggtcggccatcgcggcaaagatccggggcggcgagggcgaacgcttgcgcttcctgtcgctctcggccgacgacgacgacagctcgagctcgtcgagcgccatcggcactgcaccatcctcgccgatagccgacgccgacgattccgccacaacgtcgatcggcgccgcttcggccgcagcgtcagtcggcgtgacgtcggctgctgcgttttccgtcgctacgctaatcgacggctcctcggcgacctttgaaatgacctctggaccgtccgttaaggccggtatggtcgaggcagacacggcagcgaccgaccaaacctggaccgtgtcgttggtgaagatcggcttggtctcgttgtagccgctgaccatcgagcgctcgatgacgacaatctcgacgaggtcgctaaggggatcaggcgggcgtgaggcagaggccaacgtcagctcgggcgccgctacgagatgccgagctaggcgacgacgcaccggttcaagaagtggcgcatcgtcgcgatgagcgccgccgtattctccggcccgacgatcgtgaccttgcgcgctccacggtcggcgagtgtaaagatcatgccgctcaggccgcccgtgtcctctggccggaggctcgtcaggaagatcgtgttgaggttgcgaagcttggccttgccctggacaattgtccgctgggcgccctcgggcgcgtcaaactggtagcgctcgacgttgacattgacctgaaggcagggcgtcgaatcgaccgtcgtggacgacagcgattggagtgagaactgcattccgtcgggtttgaaaaggggcgacgtgaggacggcgggcgtgcggacgaggtgcgcaggcggctccggaggaagaaggaggctgctgctcgaggcgacaagcgcgttcgtgagggaccggtagggtcggtccgcacttggcagaagcgagcgatagcgaactggggacgaggagtcgtcggcggtggtgtcggctgctgacgagtctgggctggcaggctgggacttgagcggaagagtcgtggccggaaaggcgagcggctttggcgagtcggcgtcggcggaggcagaaggagctccggccgggcttccgaaggacttctttctaagactgctcgacgacgggagcggcgcccaagagatgcctcgcgacgggaaggtctgctgctgcgggttgcggtggccgaggacgcgctggggccggcaggtggcggcggcggcagctgcagcaatctggatcgaccggaggagcggaatcgtcggaggcccgggctctaggaggccgcttggaaggaggagagagcggtgcgcgagctgcccgttaggaaggagggcagacagggaccgatcggatgggctgacagcaggcagagctggagcacagggggtcggagggagggacggcgaggtgaagggcgaccggacggggagctcagatagttagcttctgcgagctcgatgggacaccttcagggcagcagacgcaccttcccaagcgacaggcaagacagtcgagctagaggtgagcgaggacggtcagaaggcaccgtcgtcgtcgtcgtcgtcggcgtctccgcggtcgacatttcgagagagcccaaagcaggctcaacagccgccccgacttggggttcaagccgtaaaggggctcgctgctcgccttctcccttcacctgctcgctcactccatctctctcgccctccctccgcaagcgacaccggcattcaagtctccgatcaacctccaggacaatacctctcgctcgtgctctgggccagcttgttccgacaccggcacctcaccgccgttcctgccgcgcccctcggccgcccttgaccgcgcacgcgtcggtcttgccgccttgaagccctcgctaccaggtcagttgcgaacacgtgcgctccgactgtctgctcgggatcttctagcgctgacccacttacagatcgcgtctcgttgcactgggtgcctcggcagctgcctcacccttgccgcgctgcgcacgagccgacgtccaagcttccaggtctagccttccaccaccagcaagtcaccgtcaaggatgtctccgtcaaagtcaaagatcgctgtccgtctcgtcccgcatgagcgtctcgcggacgtgatgccggagtccggcggggatctcgagctgactcggcccttcatgtcgcttcgaccactccttccaggttcttcagtcccagctgcaggccaaaggcgccggcaagtgggccttccgaagtgccagtccgctctctacaccgccgtcctcgcctctgtcgccgccttctggatccgacgactcgatgccttccatgatcgacgacaccaaggtacctacagtctctcccgaacagattgacgaccccacgggtgatcgctgatcaacgaacgacgcactctccgctccgatcgcagacatctcagcggcccgaagtcccagcaaagcctccttcaacctgggctgaaccgttggtcgttcctcgtactgtcgaaccggatattgtcactaccagtgctgccgctccggccctggtcgaccagcaacctcgcaaaaaggtgcctcgcatcgtgttagacttgacgccaaccggtcgttaaagcctcagcggcggctacccaaaaagaagaggccacaccaagcaaggaagcaggcccattgatcatggccgtctcgttggccgtgcctcgtagcctccctctgttcccttgacgacccctctcttgccgcgacgctttcccatatgacaagagaagacttgtcatattctccctctctgtgacggctcatgccatatctgacgacgcagacaggctcgaaccgcgggcgaggacgacctgcgactgctgcgcgtcgcgtcttgatccctcgctgcctcccgccgatctgcctccccaacctccatgacctctgtcccgtcctcctccgcacctgccgcaatctctctcacccaggcggccgcaagctcgctcggtcttcagcaggcgtcggctgccgagcgagccgagcgcacgcgaaacgctgcccgagctgaggcgctcgcgagccagaagaaggcccgcgatggcagggtgctcgctcgtcggctcgagggcatcacgcgcttgctctcccagggcggggcggccatcggctctgaagacgacgacgacgacgacgacggcagcgatgacgacggccagttgacggcaacagggacagcatcagtaggaggtgtcgctcctcccgcccctcggcagacgccggcggacgagtcgatggacgttgaggcgtcgtccttggccaccgctgcgggcagtgctgctcgcaagcccggcaagaggagaaagggcaagagcagagaggccctccaggacgtgtgcgttctcagaccctcgccgatgcttgctcggcgtgtgagctcgaggctagagctgaccccctcgcctgcgtaccgcccggcagcctcacctatgcccacctcttcacgctctcgccgaccattgcttcgccgccactgccgacatcagccgagctcgtcgacggctacctcgcgctcggtccaattcccaatggcaagcgctgtctgctcgtcacaggcccgagtcgtgcgtccctctgctcgcgcgcagcgcagcctacccctcttgcgagagcgtgcactgactgacctgattgaccggacttcttttcaggaggagctagtgcgtcaacggcgctccatacgcgtgtctcggcgcgcgttctgctcaagtgggtcgcccctttgcccggtggcactgtgctcgactgcctactgccgaccgactggaagtcgaccggcgtcctgtacgttctcgactgcctgcgctggaaggacctcgacattgccgcctcgggcgccccactccggcagttcttcctccgctcgcggctcgccgagctgccgccatcgcaggtggcgccgcctcggctcgtgggcaagagctctgcgggtgccgccgccggcttcaagcacccgacctcgttcctcccagtcccttcattcgggccgcccatcagtcccgatcaatgggcgaggctccggaccgctggtctctgcgcgggcgagggtatcatgatcctcggcgccgaaggcagctacgtcacgggctccgagcttgacgtcggcgaggcgtggtgggtcgggccagaagaggtcgatgacctgctcgcgtacgtgcccgctcccgacgaccttccctgtcgcaaagcgtcccgctgactctgccacattttgcccagtgttgtgagcggctttgctcacccgacggacggcgctctggctcagccctgaccgtggcgacattgcgccaatgcctgcccaatctgacgatcttgacgacccctcttaacgaccatctgatctgcgcccgttgagcatctgagtccatcaataggccagggcgtacggcgaaggggccgctcctgcctccttctgaacgtgctcgattcgcaggacggcgagctgactgcgccattcgtctttcgagatgtaggcgccacacatgcgccggtagccggtgaaggcggcgcggccgtgcatgacgcggtggttgtcgatgactggccgagcgggggagagcctagagtcagcgcgtgcttacaaggcaagcgagcggaccgacgcaccgactgtggttcctggcttcagcttgacccaaacctggtgctcctcgcgcctgacgacggactcccatcgtcgagcggcggcataccaggcgtcgacgtcctcggccgtccaaccctcggccgcgccgcccatttttgcccgatcctcgttgttccaccggataccgacgagacggccacgctggtcgtgctcgaagactgggtggccctcggacgtgtgaaaaaggaaccctttcgacccggcagcgacggccggcgtcttaagtctgctgaggacggcgtagtcggccggatgctcggcccggaaggccgccgcgcaggtgaagccgtcgacgaggaggctctcgccgcctttgcccggcggcgggtgggcgagcagatgaaagacttggatcccggccgggtcgacaaagtacgagccgtcagtgtgggcgccgagcgcctggttcgagtaggcgaggtcgccccggctcatgtcggccgtaaagtcccagaactggccgtagtgggtctcgcggagcggtcggccggcgacaagcgtccggcagagcgcttcggtcgcatcggtcgtcggtgggacgccgtcaatgaatacaacgccgtgcatttcgagcagctcgagcgccggaagcaatccagtcggagagccagtcgcgagcgagtcataagagacacttggctgtcgtgcggcatacgtcgcagggtccgtccagaggtgcttgctgtgagagggaagggcagggtcagtagcggcgccgaccgactgcgcgattactcggcgacgcactcctcagggacgacctgatctagggctgcgaccttgacggcgggtgcgatcgagcgaagatagtcgagcggataggtcgactgatgtgcgtcgtgcgaccctgagagcgagcggcggctgtcagcccttgcctgactgtttcgggccgcagcgtgagttcgggcgctggctcacacgtgacatgcaggacgccgccctcgagcttgagcgacgccggctgaagatcatccggaagctagagcgaatcatctacaggtcagccggtctgattacagtaacttgagagatcgacacgacgacgtaccgagaaggtgtcgaggaggcgctgttgcgtcgccgggtgaaaggcgtcggccgatcggcagtgatcgcggaggtgtatcggcgagctgccaggcggaccttctcgtcagcttccggagcgcaggccggacgtggaggagcgtggtagcacgcacaagctcatgccgtcgacgacgatccggccgttgacgaactgcggcggctgaaaagagttcgaggccaggcttgcggccggtgttgacgccggcgttccagcatagacccgagctagccgagagctagaagcgacgccgagctgcgcctgacctcgagatcggcccgagaagctcgtagccagggcttgacgagagagtggccggcgggcaacgctggaggaggaggacgacgacgaggtcgcaacggctgcccggcgagcgagcgacggcaggaggcgacggccttgagcagagagctggtggtcagggcatcagctgctgcgactgctgccctttatggcctcctatactcacagaggtcgtcatggcggtccggaggggaaggcgtcgtcgtcggagggacgccgccatctcatcagcctcgggcttcgccggtccaaatcccagtatgggttatttgggcctcgacgaatgaccgacgaccactactaacgacgacgaggcacaagcaacgactatcgcaacgacgaggatcgaccggacgagtgtgacgagtagcggagaaccgaccgggacgaacagcgcaggactcttcttaaaacgatgtcgacctcctacccgcactacacctcgctgctcgggacctcgccctcgtcggcgaccctccgcgcaggctcgacgctcgaccaggtcattgcccgggccaagagccatccgagtcctcgcccgcgctcgccgaagcggtcgactgcgatgacgcctccgggaggagctcctgatcggccagcggacgatgtgctcgacgatcttgacgaggaggcaagcttgctgccgccccctgccctccccgtcgggtcgacgacgaccggctatggtgcgacggctaacggcaacggaggacgcaggctgtcgagcagctcgtcgcggcgcggtcgcccgccgtcgttcccgacctcggagaacagagagcagcacgtctctgtcgagggcaagctgccgctgctcaacccgcaggtgctgacggccgagcagggcggcgagacggcactcgaggaggaggagcgtctgctaggtcatgccggcggcggcgaccacggcatcgccgacagcgacgagcgcgactggcgggaggctgtcaaggtcggtctcttgtggtgagttgctctcaggcctgtcgcgtgtgctgacgacttcctcgccgccgttcctgcccgccagaccgaggccaggatcctcatccgtgagtccaggttgcgcgcagctagtgtcgaccctcactgaccgtgccgtctctggtttccagtctctgtcctgtgcgcttctccagcctctcgtacttgatgccaatgagcgcccctcgctgacgcctgaatcgaccgacccaggcccatcatgctcacccagctcgcagagtattcgctcatcatggcctcggtcatctcgatcggccacctatcggtcggcccaaacgacctggcggcctcgtcactcgcgagcatgacggcctcggtctcggccttttcgatcctccagggcatcgcctcgtcgctcgacacgcttctcccggcggcatggacgtcgtccgacccgtcgcgcgtcggcctctgggcccagcgcgtgtcggtcatcgtgctcggggcgatgccgatgattggctttgtctggttcaatgccgagcacatcctcctctttctcaagcaggaccccgaggtcgcccacaaggcgagcgtttaccttcgcgcgctcagcgtcggcctcccgggctatgcggccaactgcatcctgaaaaagtactttcaggcgcagggaaagtacaatgtaccgaccgtcgtcgtcctcgtcaccgcgccgatcaacatcgccctcaactggctgctcgtctggggtccgttcccggccatcaacctcggcttcaaaggcgccccgctcgcgacggccttttcgtacaacctcgaggttcgtcgggcgtgacgtcgtgcaaggcgccctcgtcactctctgacaaagcctgctcctatctcctcctccgcaggccgtcctgttcatcgtctacgcctgcctctcgtctgacaagcgtgcctggccggggatctcgttcggccaggccttcagcaagctcgggacgtgctttacgctcagcatggccggcattggcatgacggcctccgagtggtggtcgtgggagtttgtcacgctcgcagcctcgctcctcggtcgtacgtctcccagccgctcgccgaaccccaccaccatccgtacagcccctgaccccctttgatcccgctctgcagcgacggccctcgccgcccagtcgatcctcctcttgacctgcagcgtcgcataccagctgccgttttcactcagcgtcgcgacgagcgtccgggctggcaacctgctcggcgccggccggggctgggaggcaaagatggtctcgtgggtcgcgctcggcctcgccgtctttatcgccggctcgaacaggtaagctggcgtgctttccaaagtcgagagttgccccttcccacgcccccggctgaccttcgcttcgcttctcagcgccctcctgctcgcggtccggcacgactgggcacgcatctttaacaacgatccggaggtcgtccggcgcgttgccgagctcctcccctggctcgcctttttccagctctcagacggcctgacgggcgtcgccaacggcatcctccgcgttcttggccggcagtcgatcggcgcgacactcaacattacgtcgtactatatctttggcctgccgatcggcttctatctgacgttcaaccggaagcttgggctcgagggcttgtggatcggcttgtcgctgtccgtcccccgttcgctggtctccgctctttcttgcgcgcgcgcgggcctacagagctgacccgtttccttctgtgacctgcagcgcgctcacgtacagcgccattggctcggtctggctcgtctcgcgcgcagactgggcgagggaggtcgagaaagcccaggagcggcaggacggcggcacggcggcggccggcggcggcgaaacgaggggcttgctcgcggacgtcgtcgaggaggacgacggcgaggagatctaagacggatcttcgttcgcggtgagtaggggtggaagaaaaggggcgtcgtgcttggaaggcttctcagagaaggcgacttatagcagcagcctcgaccggcccggatgcccccccgctcccgtccgtccctttcggcctcctacccccactcgacagcaccttgccggcagaagcgctctacaccgacgaggagccgaagatgatgaaggaaagagggtcatagtcgggctcgggctgtcgttacaaagggatggatctccgcgccaggcggagggtggtcaaacgagtgtcggggggccccccccccccccccccctcttccatgacaacagctacgtctacggttctcgggtcgaatcgggcggccggatgtggaacgggtgcgtctttcttagacttggcctgattagcttctccccgctgacttgacttgcgctccgcttcatcagcgccatcaaccggctcctgatttgcctcgtctgcatgcagcttctcatggtcctgagtgagcacttcccgcgctgcccatccaaacatctgccgtcgtctgatgtccaactcttttccctgctccagccatcacgctcatgcgaacctcatggcgcgacgcaatcgccgcctgcccgccaatcctcatcacgattgccttcaaaatctttgtgctccggccgtacgcgacgcagttcaagtactttgctccctcgcccgaggagctcgtcgacctcgcgcgtgagtcgcagcgctcgtacaagcagcgctttattcacccggctctcggcaacgagacgctttacacgatcatggtccacaaggagcagcaggagcttgtgcgcatgatcctggcgccctactcgcgcaagctccagtccgaggtcgccggcgtccgcgaggtgcgtgttgctaccgctgagcaggccatgccgcccacctgttcacgcccgcctcctttgccgccccgagtagaaggacctggccgagtacaaccctcagctcgatcagaccatccaccagcaagatgccgtcaccgacgccgacgacctcacaagccgcgtcggcggcgaccacgactcggtccttcaggccccggcctatccgggcagcctcgcgcgcacccactccgagcagtcgcaccaggacgtctattacacacgcgagaacgaatccgaagtcgacctcgtccgctcggccgcacccctcgccggcgaggaccagggctactacggctgtcagcagcctctcaatgtgcgtcataccccctctttacaagttcttctggctctttccaatttgaccgtctacgccaccctccagagctatgacccgagctggggcacccagcagccctttgtgccgaccggctcaaccgcgaaccttgtcgccgcgccgctgctcacgcgcgacgactcgtacggcgacgagtcgtaccagatggccgacctgccgtcgcgagtcgcctctccagcgctccgtagccctggcggctacgtcaacgtcgctcaccacgaccgcgacggcagtggtgacctcggcggtgggcccaacttctaccagcagcagtcccgcttctgagcagctcctgcatacctttttctctttcccttttctcgcccctcaagctgctcgctcgcgcccctgctattctcctgttgtccaatttatccgcacctggcgtgcgcctcggcctcatgtctacaccctcaaaacgaaaacctcgcacgtcctccagcctttccttccctcaacgaacgatcgccccttttgcatcgcaattgcctccttcgcagacttttagatgctctgattacgcccgtgctgcaaactgtatgggttcatcagatcgccagttctcacacgaacggcggccatggcgggcctgggacgactggcggcggcggatttggcactgccactggctctggtgctgctccagctcgggcggcgtcgcgcgcgactcgctcccgctcctcggtctgttgtcgcagccagcgactggaggcggaaagtgcgtcaggggacgatttgttaagggggactgccattcagagacgacgtacttgcgcagccaggaaagaaaggctacgaaaagacagaggaacatgagcagcattgactggaagacagggggcggcgagggtcagcaggatgcagctgcaagtcgaagaagcgacgatcatcgcacctcgaaccaggcgtcgtcgtcgtcatcgtagaactcgttatcgccatcggcggccgtgctgatccaatcgccctcgtcaaagacggctcctcgaccggcgccgccgtcaccgtcgtcgagggcttgccgctcctggccgccggtaccccgagcccgctcctcttctaggtcgtcgttcgtcagcgaccagcccttaaggccctgcttcaggctctcgatcagaccgaccctcgctggctgatcgcgtcgatcctgcgacgaccagagcgaaagtccgcgctgaggctggccggtaaaggatgcccagagcgagcgcgcatagagccggagcaaggcgaggttgaccggcaaggcggcatcgcggtcggtagtcagcgctaggtcgtaattgcgcttcgcgaggtgccagtcctagcggatcggaaagccgtcagcacatcgacgggtgcagcttttgtgcgtcaagacggacctgcggaacgccgaggccgtgctcgtacatgtagccgaggttgaagtaggccatggccgaactctggctctcagccgccgcctggtaaaagccggccgccttctccatctgcggcggttcgccagtcagacccttatagtggtagtcgccgagctaatccggggcgcagaaaaaggaccgtcgtcagccttgcgtgatggggcagagacctgatcggccgactcaccttcaccagtgcgtcgacgtcgtcctgagcggccgatcgcatccaatggttcaaagcgattttagccgtctcattgtgggcggtcactcgacgccagggcagggtgtagaccggcgtgtctgttgggcgggaaggaggatgtctcagcaaaagctttgcgttccgccctgcatctcgctcagtccagagaccgaccttggtcaagaaggaatgcaaggttgttttgcgcgctctcgacgccgcgctcgctcgccatccaccagccgaggatcgccttgtcggtctcgccgcgctcccagttgcggtcggcctcgagccagccgccaaagtcttcgtcccagcagccgcgctcggccgcctgcttgaggtgggcgatcgcaacgccgcacgtttcgggccgggcacccgcagctagatgaccacgggccgccgttgcgtacagcattccaagatgatagtacgcctcaaaaggcgagcccgaccgtgccgcctggtgcaggaggtttgtcgccaagtggacctcgttccgagcaaggtgcagcttggccaggttaacctgagcctcggcaaggtcctgcccggcggcgtgcgtgaagtgtgcaaaggctgccttaagatcctgcttgatgccgaggccgtcacggtacatgatgccgagcccgttgtgagcctcgcgttcgccctgatgacgaaaaaaaaaacagcaggtcgagggtcagtgcctgtagcagaggctcgagttgagcgaaatcgtggacgcacaaactcggcgccccggtcaaaccagagcttggccaggcgccagcgctcacgctcgcgtgccctctcaacccgctcctttgcgttcttgcccgtgccaaagtccttctcgttgtcgacgcggaccttgacctcgccacgaaggtgcatccggccgagcatcgacgcgctcaggaagacgacgtccgtgagcgatttatctgaaaagttttcgatcggcttgccgtcctgcttgcgacggccggagagcgaagcgacgggcgaatcggacggccagagcgtgcgcgcgacatgagtgaagtggatctgagccgacgcaaagctctggtgcggcgtgaggccgacgcctgcgaagaagggcaagagaaggatcagccctgggtcagagaaccctcacttggttgctgtagcgctcaccctcaggtccagaagcccatccgccacgagcgttgctgcaagagggtgtcatcctcagccacgagttgaattacgcgcgggagcagacacaagaacgcactagatgctgccggtgtagagaatctttgcgagctggtactcgtagactttgccgccccgctcgctctggtatcggtagtattcgagaatgtcctcccacgtctcgccggcctgacgggcgaggccagccttaatggcgggacgctcggcccgattgccggacgaggctgccgaagacgacaggccgtacgcgccgagggagagatccgacagcttgatcggcgtcggtggtagcgtccgaccaccaggcgggccggcaaggaacgatgcgtacgagcgccgggcggcgcgctcccaccaggcaagcgagccttcgcaagacggctcgacgccaacgccggcccagttgcgccagccgagcgcagcctcggccgtcgggtggcctgaaggagcaagtgccgagaaggtccagtgggtgagagcaacggccggcgatcgcggcaggaggtcattgtacgccgacgcgtggaagaaggcaaggaccgagtgcgaggaaggcgagccagtcagcgccgcagcgcgctgatacgactcgaggccgcgcgcgaggttctgcatcatcggcggcggtggaaactggtcatgaggcgcgcgggcgctcatacgacgtcagcgatgaagcaggacgagagcatcctcatcgagactcacaaggttgacccggccgcgcgtctcccaggcggcgacacaaccgccgtcaacagcctcctcgagcagacgctgcacctcgccgagccgacggacaacctcctcgcgcttcttcttgccactcttgccggccacgcttgcaacgcggtcgagcaggccgccgccgacgagccgggcattgtagccctcgcgccaaaagcggtcgcgcagtgccgtgacgagccggacggggaagctgccttcgctgccgggcaccggcgccgtcgaaagggttataaacacctgcgggccgggcgggatcggcgacgatggcgacgagagagaagtaagaagagaaaggtgggagagggcaaggacatgcggcttgcacgctgccgaccaaccgcatcggcaaggctcgtcagctcggcggtgacgaggcaaggcacgggacgagtcgagcgcaccgatcgtctgagcatcttgctctggcggcggcgggacctcaagcacaacctgctggccgtcctggtggagtagcaattgtcgtcagcagaagctcgtcctcagctggactgttgagcccggtcgccacgtaccgtctgcagcggcgagctgctgctctcggtggtcgccgcggcagcgacgtcgttcccggccgcctcgccgtcggttgacgcccaggccaagacgacaaacgcgaacgcagcgaggaggcgtaagagtgcgcccaagcttgtccgcatgctcctgtcgatgccctgagtaagaaatcggagagaaagggcgtgtcgagagtcttggtggccgtcgtgagctaacgaccatctcgcgctggcgcgtgccttcttggctgctggtgctgcgagctcggacgagctcccggacgaccgacgtccaccaagcctcctcacgctcctcgccctcgactgacaaggtcttgctctgtcgtcagtccttccaggtggcgagttggcgctggccggctcgagcgtcgcatcctgaccctcaaagatggtctgtgaatctgaggcaggctttcgtccagtcgcgccgtcacaatccgctcacgtcgcgtccgacggaccccggcctcgccgccgcacgtcgtccctccgaccacaggaagcctcgcacatcggtctcttctagcttgcgatggcgaagatcacgggcgtctaccttagctccttgccttgcaagaagggctgcagcaggagcttcaagagcgagtctgagcggttcaaggtgcgcgcggcacatgacgcgcctgtcgcgtcgccatcctggctgaccgtcttctgtgtcttgcactcgacgacgacagcacaacgggctcgttgaccaggacatgacaaagtgctcgctgccaacgacgggcgagagtgcggccctcttgatggctcactgcgcttcttctcctgagttgtagcactgacgcccaaccctcgcaccctccaccgtcctcgtggtcgagcgccaggccaacggcgacttcctctgcgcgatttgccgtctgttagagagtccagacccgaacgagatccgcaggcactgcaaggcgtgcggccgcctacctttcgggccgctctcgacggcgaactggaacgccgccgcgcctgctccgtctggcgcgtcgatggccggcggcggcggcggcggccgagacggctggctctcaaccttctcacacaagacgcttactggcgccgggaagagcgcctcggccgtctcttcgacggcgacgatgtcgacgacgtcgcaaggcggacgaggccagccgacgcatgcgatcaagagcccaagtcactcgcagccactgcagcatggccgacctcagcagctcccctcctccggcgtcgacaatagcgtcctagccagccaatctgccagcgtgcttcctacccttttttcgcccctgatcaacggctcgaccgccgctgttgtcatcgaggtacctccagccctcgagcagggcgatgcaacacctcgcccgagggcctcgccgcgcttgtcagtcgaaacgccgcgacgctcgatcccggccgctcaaacgccgcaaccgtcacccgctgcgtctgcgatcggcctcccggacgtcgagatggaagacgcctcggcctcggctgtaaacgttgagccttttgacgtgtcgcaagcagctcggccaggcagctcaccggtcgaggctgccggaccccaagcgacgccgtctggagcctcgcacccgccgactcagtcgacgagcgagccggcagcggcggcgacgcaggagtccggcacgccgaccagagcactttcgcccgcccgcagcatcgacccctcgcagacctccgttcatacggctttgtccccatcgccgatgcgctccgcccggaagacgtacctgccgagatgcaaaggcagtctttgcctgccgaggacggcgtactgcgaccgagcggcgccccgccgccattagtcgcttcggtcctcgtccggaccactccgtcgcccgagcgacagaagggcttctttttggcccagaagccggcctcgccgtcgaatccgagcgaccagcacggatcaatcgggctggcgcgctcaagcgcagtttctcgtcgttcaacccggtccaacaagaaggctccagcctccaatggggcgagccagccttcttcctcgcaggccggtgctgactcgagcggcaagcaagagtcatcgggcgaatcagctcggccggtcgtcaccggtataggtctccgtcggacgccaccgcgcccggcccaggttcactcgtcgcagtccaacggcacccaggcctcgtagccggcacctcgtccgcgcgccatccccttcaaccagtcgcctttcttctactaccggacgtcgatccagtcgctcctcagattcgacgacccgccttacggccggctccacaagctggcgctccgtgtcgagctgctgctcggctggcgcccgctcctgatcgacaagatcgaacgcttgctcgccagacgaggcaaggtcggcgagctcaagaaggagtacgccagggccctccagaagacgctatcgcagctcaaggacgatgctctggacaacacggttgattacttgcgcgattgggtgcgtccaggactccgttcctgtcgcggtcgtgttcattggctgaccaccctgacttcatcttgcgctttgcaattggtcaggatccagctggcgatcgaaccaagcagcgtcttcgatgcctccttctccaccctcttccgagacttttacccgcccggcggcgccggccgcgagcgcgtctcgaccttcgccgccgttatcttcaagtttgtcctctgctggtcgggccacgtcaacaagtgcgagcttttctatcctgtcacaccctcttttcgagctctgctgactggtcgatttgcctgccagccttcccgcagggctcagagccgccgacctcacctatattgacccggccgacccaccggagcaactcttggtcaacccggtaccctggacgatggcgaaaggcctgatcgacccgccctgcttgcgggttgcctcggcttggaagctcctgaagtcgctcgggtggtgggacctcgacccgagcgagctcgaccacgactcgtcacaggagggccttgtcgacccagggccccagacgcaggcctcacagtgaacgatgtcccacttgctggacccttcagacctttcttcaggtctccctttgacgacgagccagcggaatctctagggcaggtgtcatgttgcatctgcaacgtcgagcacgaccgtccggccgacgtcgatgacacgcatgcactcgtcgcggtctccaagacccatctcgatctttgccagctggagatcgtgaggcgcgagctctggcggctcgtccgacataatccagctgaggggaagaaggccggtcgcctgcggtgtcagtctggatgcatctggagaagtcaagagccgacagacggaggacgcacgtgccccagtgcacgccgaacgagtagcgagcgccgatgtcctgcgacagatgcgtcgcaccaagcgggtcctcgtggtgtaattgaagatgccatcgcgggccgtaagagccgatcgggatagcggcaagagtgactgggccgaggacctggccgacagcctcgaacagagtgggcgagtagcctgccagtcggcaaagcaatagtcgtcagcaagggcgcagcgagcgagaggtaacgtccttgcgcaccagtgtcacccgcgtggaagaagctcaggccgcgcgatccgtccttaggcaactcctcaatgtgaaacgacgcccagagcgacgtgttggtgtcgaggcccttgcgtccgctccagtgcattgtcggtgtgcaagtcacccggaaggccttgccgtcagcggccgtatgctcggcagactcccaccagctgcgaggagaaaaacgtcactgtttgtcagttgttcgggttggacgatggtggggtgcgccgttgcacgtactctagctcggttacgttcgtcaccccttcctcgacgaaccacggcttgacgccgagcggcacgaaccacctgacagagtttctcagttcgtgcacagcggcgaggtcgaggtgatcgaagtgactggcgcgcaaggggtcagctctcatccagcagtgagaggagcaagctcacatagggcggggggcgcacttgtggctgacgagcacgacgtcagtctcaaggtctcggagcttgcagggtggaggtcgcagtcgtttcggccccttgatgaggccgtccaaagtgcgatccctgagaatgcggccgcggtcagtcagccgcaagtcgatgacacgggcagagggcgaggcgacgcacgagaagattgggtcggtgagaatgcgaaggccggccatctgcacgtacgacgtcgactgtccgatctgtgagagagcatgcaagagtcaggctgaggacactgtctgcggctcgacttccggcgactcacccaggtataggtcaggcgcttcttgacgtcgcgcaggaccgaccagtccggcgtcatgacctcggtcaattgcttgagcaggtcgatcgacgagtactcggtcggcaagaatgatgcaaggggtgtgaggacgagcttccagaggaaccactcatggacgcctgcaggtagagaggcaagggggcggttggtcaggacgcgtggccgctgcgcagcgcacagagtgcagccgacgacggaccctgctcgcgccattccgggaaggggttgactgcaagtgtgagacatcaggtcagctagctgtaggccctcaaagtcacgaccaccccagagacgcaccatagcgacccaagatcttgaggctcgcccagcgcttcttgagcagctctttctcctctgagctgaaggagccgagcgccttcggccccttgcgctccccgagcgctgccatgccgcgctcgtactcgagcgtccgctcggagacgatccaccgacggcgagcatccgtgtactgcgagggttcgcaaaggtgggcaagcgtgagctcgagcgcatcgaaggcagggggaccagacggaggttccgcgaaggcatcggagcgctctgcctcaagcaaggtattggagatcagactgacgacataatagcccgaccagcctccgatgtaaattacaggaagcatgaagagcgtcttcctgaggtctgaagggcggctgacccgtcagccgcggagggggaggagcaggcgacgggcgcgcgcaagagagctcacaagggtgcaagaactgccgcatcctgcgatgtcggtcggccgctgctttcccgagtagataggcgtgcgagagcggtcgtccaaggtcagatgcaagctaaggtctaggaggaagaggagcgtgctgtcgtcgttgtggacgtcgagccaccttgggctgaggcccttcgatgccgccgtccaaaacgtcggcggcgcagcaggcgtcacgcggccgttgcggctcggtcgagcaaaacaggagagatcaaaagtctggcatgggattcatgagagatggcagcggcgctggatcacaggccgaggttttgagcggtatgtgtcggccaggtgttggccgagggcctggaaaatagcggcgggccgagccgcctgcctgtgggcgtgagaccggggtcggtgacggcggcaatcgccgagggccaggccatgagttacgtcgggcagggcacgtcttgtatgtgcgatgtagggtgatacatatgtacgtgggtttgcggcggtaggggctgagggatgccggggatgggagggagcgagggccgagcgagaggggttccgcatgacgaccgggctgcgagggagaggacgacctcgtcagcatgcggattcgctacacaacatctgccacctgggacataggcttactgattggggcaacgcctgccagtcaggcgagcagagcctgaggcaggagaagccacccagccaacggctgtgcgctcgccgcagctcgttctggtcagcgacgttcagccgcatgacgactggcagctgtcaaccgctgcaggggttaatcagacggcgtcagtacttctctcgcgctgaatctggcgaccggccaaaggccaggacgcgaagcacgtactgccacgggtgttacggagggtgccgtaccgcttgccgcttccaccacctcctcctcctccgcgaccgcccccacctccgtctcctcctccgctgccgccgccgcgtcgagcgtccttgatgccgactgagccgacatcggggtccataatggacctgaagaacaggacaaggatcgtccagaggcccgagaagagcgcctggagctgctggaggaaggtcggcgcggcgcgagtgcggatcgcgcccgaggcgtcgacgtagctgccgccgccgccgttggtcttgcgggccgaggcggacatcactgctggtcgtatgtgacctgcagagtccaagctgtgagggattggcctggcgagaatgaaggaaaaccggatggttcgaacggtgcgatggccgtcgagggcgacgcgaacgtcgtccggctccgagcggcgcgagagactcatgcgcaggcgggcgtcgaatcgacccagcgagctttcacgatcgtcagaaagcagggtggatacgcatgtatgaggagatcaaacgctggtggcgctttttgagatagctacagtagggggtcggagagatgacgtgagagcgagatagattgacgcgggcgctactcagaggaacagaacgccggtcggcttctcgacctggacaggctcggcgacgggccgccagaggccatccttgtcctgcccgaggacagagacccagccgtcggcctgaccgccagtgacgacaaagcggccgtccttcgagacgcctgtcgcgcggaactcgcggcccttggggtaggcaaactgttggagctcgagctcgcccgacggcaagacggcaaagaaggcgagggcgtcggtcggccggtcaaagagcgtgcgcgtgctcgcgacgagcgtcgggtgcggctgggtcgagttgagcaggaggagctccgagccggaggggaacgtgttctgcgcgaccggctcggccggcggcggggcgatgaccgacgtcttgctcttgaacgaggtcttctcgccgtcgaccttgacgtaaacgacgttcggcaggagctcgttcatgatgtaaaggtccttgcctgatgaagacgttgccggtcagcgagagcaaagtagagtaggtgcgagggacgacgcacccttgtcaccgacgacgatgtgccgcggtcctcctccgttatcgccagcaacgtgcgcgccctcctggagtttccagctgatgacgccagccttctcctcgagcgcaagccgccagaccttgtcctggccgaggtcggggacccagatttcggcccggccgccctcgacgacaacctcgacgacctcgtgcgggtgcgaggcctcctgccggttctcgttccgaagcggcgtcttagtcggctcgaaggggaacttgatcaggttgcccggcgccgacgagaaggagccgtcggcctcgagaggctggaggaagacggagccgcctgcgagaacggtgagggaggttgatgacgcgtcagcagctgcgcacgccgtcggaaggacgaagcgtgtctcttccaagaaagaaagatgcgcgactgaccggcgtagttggcgactgccagggccttgccatcagcgacgacggcgcagtgggccctagagatgaaagaagaaacagagggagagtcagcaacaccgttggcgaaataagcccagctcgcaagaggaacgaacggagcggcgccgagcgtcgagcgcgttccctcgaccttggcctcctttgcgtcctggccgagccggacctggacgatctcgccatcctcgggctccttctccaggacgccataaacgacgtcggcgtgcttcgggtgctgagcaaaccacgaggccgactcgccgagcttgtgtgagggcccgacgacgagcttgccgtcagtgccgtcggccgtcgatggcggcgtgaagtagacgacgtgggcgctctcgggagaggcgtacgagcccatcaggatagtcattggcgacgacatgctggctgcgaggttgctgctggtgctgatggtggtggtgggagggggagcgatggacgaaggcgaagtggcggcgtcgtacggtcgggcgaaggcgccgtggaaggcgaggccggccgtgatgatgcggcagagcgaagggagcatggtttcgggcaagtaagtcgtcgtcaacctgcaaagaggtggctcagaacctcagtccaaagatgggcccgcctgcagctttttttttcatgctagctctcatgtgaggttctgctggatggtcgccgaatggtcggcttgctcctgctggcaccgccggcgaaaggcgcagcagcagccgacgaagccccgctagggacccccaggccgcgcagttgcaggcgggtctaaggcaggtcaagtcgtcaaacaatctcgattgcgaacgggcgtcgtaaaggcagcagggatacaagggcacgatcaagcgaggtgagtcgcagatcgtcaggggtggggtgcgggaagggggacccttggaatgaccgctgggacggaagccgttggacagatgctgagcgagcggagcgaaaggggaggcagatgctggatgaattcgagggatcgtgaggccgagaacgtagaggcgaggccaatcgtctgcccagggcgtcggccgagcgctgcggcgagtgcacggaggcggcctgcgatagacgagtgtcgccgggcaggcgagtcggctgcagtgcggagagcctcgacatcgtagcgaccgacccaaccagatggtgatacagcgcacgagccgagtaggacggccgtacgagagacatgcgaaagggagcatgcgctggcccttacttggctcgttgcgagagccaagagagaatgatgtcgatgttgtgttgcgtcttcatgctcgccgcgtacgcctaggagttacgcaagagaacagagttagcgtggctgatctcgaacacataatcggaggaatgataggcgggacgaaccgagacgggccggttcgtgatcttgtcgagccgcatctctttgatgagctgctctatgctgagcgcctgttcgaggtcagacttgttgccgagctgagcacgaaatggaggtgagagatagggtgtcagagccaaggacgatatcactgacaggaacggcgaatgggcggcgtcggaggcatgctggaacgtacgatgagaagggggacgcccttgagctctggaatagagagcagtgcatgtagttcgctcgttgatgaaggcaaggcgtcgtgctgcgtaacaaagagccagagtaggtcaagaggttagtctcagctgcgggcagggcgagagacaggcaggtgctcgcgcagcaagtcggatgaagtcggtggttctcggcgagaaggaaagatgaaacgaacgtcggcagcgtcgacgacgtatctagaggagaagaagtagcatgaaagccgagcaaggtcaggatttgaaacaggtccgcgagatgccgcgcaggtgaatggaaaagccattagacgtacacgatggcctgaacgccgcgacagtagcgctcccacctgcgattagcagagtccagagcggagtacgaagaggagagaagcaagcagcacatagggcatgacggatcgcatcagccgtgagatcgaccgtcgcgcggccggctggcggcgacccgcggcagtccggcgagatcaacagaaacgcacatgttgcggaatttgggttggcctgcgacgtcctgtaagcacatgacgagtcaagagccagcagtaagcaacactatcgtcagttggatctcgtacgggctgccgaggggaagcgaacggacccagatcttgaacgtcactgcgcccttcttgacgcgccgcagctgattggcaggatacgaagaggcacagagggaggtcggttagcatgccgcactcggatggagagactgtcatgcccgggcagttgccggccaactcgagctccgtgtcgctcaagccgccgatgctcaaagcccaaacgagacgagcgagcgagcagcacgattgacgacaggggtgggcggacgaacgttgaaggcaacggttgggacgacatcctccgagaactggccatgcgagaggacgttaacgaacgatgtcttgccgctcgcttgaaggctgaagagtgacagagagaggatgcgtcagtgtcgccggaggaagaggctgaggtgggaagcggagcggccgcggacggacccgacgatggagacctcgagctcctttgcgaagaagagcgagcgaagccagtcggaaaaccagctgaagagggaggatgagctgctcatgtggatcggctagggaaagtcaggacgagagtgcgagccgaggggcgatgggtgtctggcgcaagcgaaccgtcgtcggctgagacgtcagcgtcgtcgttcgcgcgggcgaccaggctggcgggaggcaacccgacggactcaagctctccctctttgcaatttcagctcgtgactggccaaggcaaaacaggctcatccctccatcgtgttgcctgcaggagagtaggctcttctgctggagggttcgagcaacgatggagggcctcgacgtcgccggctgcgtgcgctgcagcgtaaccagcgtaagtgcgcgtaaacccaagccaattcaggccggagaactgcgcgagtcgacctcccgagccctccgacgctcatactcggctcgacccctcctcctccctaccgcctcgtaagtcgatttggtaggctctgccggaaaggctggcgtcagatctcctcactgacatcgcaatcttctctcctcgactacctagctcgcccgtccgttccgtcgccatgcgtcagctcaagcaccacgagaagaagctcctcaagaaggtcgacttcctgaacgtccgtccgccgctgtcttgccttggtcatcgtgcgactctcgtaggcaaccggtgctgaatatccgtcattcttcgatcgctacagtacaagcaggatgcgagcctacgcgagaccaaggttatgcgccggtaccacctccaggaccgcgaggactacaacaagtgcgtcccgccggctgatcccgctcgctgttgggcgtcgaggagtgtcgtagatagcagaacagaaattgataaggggtgacggctgaactggctgacgcacgcgggagtcatgtatcgagccccgccgggcaggcggtcggtcaacggccacgctcgcctggccccaacggaagtgtcaccggctcgttctcaagccgctaagctcagctgtcatcagccagtctcgggcatcgagccgccctttgggcgtcgtttgccaccagcctgccttgctagatgggcgactggtgtgctgcggcaccttcttggagctacgttgcttgcacccgagccgccactgacttaccttctctacttccctccaggtacaacaagcttgcaggttcggtccgccagctcgcgcaccgactctcgctcctcccagcggccgaccctttccggcacgccaaggaggccgacctcctatcgaagctctacgacatgggcatcctcaaccttgagaacaagctctcggacgtcgagaacaaggtgtcggtctctggcttctgccggaggcggcttgccgtcgtcgtttgccggatgcgcatggccgagacggttggaacagtgcgtcccttggccacctcgtcacggatctcgcacacgggcagcgcctgcgcatccgtacgcgcagcgtcgctgatcctcatcgcgcaccctcctccctgctccctttctaggccgtcaagtacatcgagcagggccacatccgcgtcggtccctcgacagtgaccgacccggcctacctcgtcacccgctcaaacgaggactttgtcacctgggtcgacacctccaaggtcaagcggaccgtcatgacgtacaacgacgagctcgacgactttgacctcctctagaggacgttgttggtctcctctcatctcttcacgctgtagcaacttcggttgtctgccctgggcctgggtgcggcttccgccggccacctgccctcgcgcggtggcactcgtgctccgcctgactcgcctcgcccttcccgccgcggaaaggcgcgaatgtacttcccacacaacattcttctcttccatagacgagccgagcggctctagtgtacttgtctctcagaagcctagtctcgcgcaagcagagtgtcgtgacagactcatcataatcgttcgacgcccggctcgcgagccacgtcgctctgtgtccatttcctcaatccttggcccagtgaccgcctctggacggtcgtctatagctttgtaggccgggtgagggctctgccgccaattgccgggcgctcgagactggccgagagcttgtcctcgaccgaccggccgaccagctgcaagcgcaactgttgcgaagatcacttcacttcttcttgttgatcggcggcgcgtcggccttggtggcagcctcaatcgcgtcaaagtcgggcttgggaagggctgataaaggagcaggcggcggtggcgcgagttgtcagctcgggtaaacaggcggcgcaatcaacgctcgtcgaggggcggcaagtcagacgcaccaggctggtgagatagaagcaggtgcagcgagaggcgcagagttgaggatgtgtcaatacgcaaatccttgcaggtcactgaggctgaacctagcacgtacgtgcttagcgtcgaagtgctgccgtgcgccagagtcgcaggataaggcggtcaaaaaaacagtcagcgaggaatcaccggacaggtctgtttcgtctgtccgactgtgccagcgacgacgcacctcgatcaggttgttcctgcgagcgagggagaaaggcggcgcgtcagctcgtggccactgcgacatgagcgagcaggaaggcagtgcacttgttggccatcggctgcttgcagcccgggcagacaatcttgactaaagatggccgtcagaggagtgggcaatcagcccatggcgactcgatgggagcagaccagcctgtcgaacggtcgtcgcgcgacaggtgtcaggcaggacgcaccagccttggcgtgaccggcaagatggctctgagctcccttcgcctttttagcagcctcggcgttcttggcctgtgcctgaacctggtgtggcgaggtagagtagacgtcagtaagtgtcaagcaagcggcagagagggactcggagggaaggtagaagcaccttctggagtccgcgagccatgattgatgcctaaagggcagaggggtgacgaggatcagctcgaatagtcgtgagcatagcagcaggctgcccacgacacatacttgttcggtggttaaaggaggtgggcgaagacgagaagctagcgttgagggagtcggcacgctgcgttcagcccgcgttcgacttctcggagtcggccgagccgaccttgctttcttttcttttttttgcgtggctcgagccgttggcactcgtacgcacgagcctctctcccctgggcgccctttcttgcagctgggctcgtgagcgaaggacaggacctctgatgcccagcaagtcgtcagcgtgcacgtaagattgattgtcagtcactttcgagctcggccagccgaagaaaaaggcgaccgccgcgggcttatcgcgcacacggggccggccgcctgcagcggagcgtctcaaagacgtgaatgagcagtagagtgcgacctccgcctgacagtctgagtaagcgggccgctctgcgaggctctgcgatcgggagggcagctcgattgaccagacgatctcgtcggtcggccgccgacatccgcgtcgtcggcgtcaggtcgcaggctcgcctcccgcctctgccgagccaacgacgtctctcctcgccagcctatccagcccaagctcttcggcatggacgactttccgtgccgggcctgtggctggcgctacccgtcgggcaacgaacggtaccaacacgtcgcagggacccactggaccgtcatgcgattgaggctcgagcctgaagggccaggtgcgcctccgagcttcaggcatcggcacccactcgcgctggaccgaaagtcctagcgctgatccaggcgtgttgtcatgaccagttttcgagatcaagcgttcggatgacggcaagttttactgaatggcgccgtgatcgcacgcagccgcctcgccttggtcgctgcggtcgcacgtcggcggcggtaagaagcactgctcatacgtcgacgaggccgttgccgcaagccggctactgtgggctcgcatcgagggcttgctggccggccgagtctcgcagccagggactgaggagggcttggacggcaaaggcggtgagtcggacgagctagcagctgctagttgcaggcgatcggcggcagacgtttttctgaccatcttcttgcccgcctcaatgtgttcaggccgcatgagctcccgcacggtcaatccgctcggccaaccgtctgggccagtacgaggctctggatcggcgaccgtatcgaatgcgctggccggaccgtcgaagctgccatcggccgctgcgacgaatggaccggagttaagcatctcgtcgactcctcgcctctcaggagcagacccggccgaaggacctctgcgaagcacccgtttgcctgctctgagctaggctgcgatgccacgtacgagtcattgaaatcaatccaacagcattgtcgacgtcagcactggtcaaagtttctccttctggtggaggccacaggtgcgatgctcatcttccttctagctctcaagtcagcagtccctgacgacgcccggcgtgtgatctcgtctctcagcctatgaagtcacgaggaccgaaggccgtttccgttgcgccgcttgctcggcctccgacctcgatccgtacggcctcaaaggacacgtcaaggagtgcgcgagcctgcgcgccgcatacaaaacgggcatcatctcgtggctggtcgttcaaggcacgatggcggccaacggcaagccccgccagcctagctcagtcttgtacaggcttgcaaccgaaggtgccgaaggtcaatctgtctctgtccgaacgcggcgtctcctggacctgaagctgatcagcgttcaaatctgaagccatgagctcctgcccgagccttcagtcttgcacatcggcggttgcgtcagcctccacggtgcgccaagcagtcgaacctcttcccttccgcactcgcacctgatcagctgtgctccccccaggttaacggcgtcgcccccttcttagccgacgacgacgacgacgacgacgagtttcatccgagttcgagcggcgacgaagacggctttgatcactcgcggccgtttgccggaacgctccccggctggccgcagaggcaactggatccggtcgccggtcgcctgccgacgtctgctcacgactttgacgttgccaaggcggcttttgccgccaaatcgacctggccttgcagcctttgcgccctcattgcgacgagtgctgttaatcgtcgtttgtacgaacgcaacggcaacgacggtcagtcgataggaagccgctatcgcaacgccctatcatctgacgccttcaacgcccctcctcacgcccctcctccagagtcctctgacgaagaatcgctgagggcgctggatgggctgtcagcgagcgaaagccgccggacgaccaccgcagacgattcgccgcctgccggtgacttccgctgcgcgtcctgcaagtcaagcttcgagagccaggccatgctgctcaaccacgagacgagctacaaatggtcgcagtaccactttgctctggacgaccgcggtacgtgccttgtgccatcgctcacctgatgtgctggccgtcgctgactgagcttctgcctcgacctcgtcgcagtctacgacattcctcggtccgcctcaggcttctttgagtgcgcgggccgaggctgcgacttcaagaaacgcaacccctaccacctgaaaagccatcttaaggactgtcgaaaatttcatcgtctgagccaagacgcgctctcgtgggctgtcgtcgagggccgatccgatagcagaggtcgtacactccagccgggcagcgtaaagcttagggcgcttgaagggcgcagcaaagatgagtacaattggcttcgaaggctcggaggcgcctcgctgactaaccctacccctcttacagagcatgcaacaacagcccgaggcgaggtttccggccagccgttaaacaatgagggcgaaagcagtgaaaagatgggctcggatgactcggacgagccgctggctcacaaggtgcgtcctccgccccgaatcccagcgggtgagttaagctgacctggcacccgactggtcatagccgttcctcctcgtcggcgcaccgccctcaacagccgagcagcgagattcgtctccttcgagcatcacacatcggcagcctccgatcgctgcagtcgaagccagcgcgacggcgaacgtcaacccgtcctcggctgaaacctccggggaccgtgagctgcttcgcccagcgctcgccgagcgattggtagctcctctctcggacgccgtcgtcagccttgccctgccgctgcagcgatcgtcgtcgccgccgtacacagctggattggtcgccgtcgatcgcaaggccagctggactaagcgtccggctctggtcgcagctccggtggcttctcctgctcctccggctgctccggtgccttcttcactcccggctgttccttcggctgctctcgcgcctcctgcctcgacccaagtgccgccttctccggcgctggacacggtgatcgtcatcgatgtgtgttcgagcgcccgccttgagccttgcgaggcttttaatgctgactcgatggtcatgcgtgtccctaagtcctctgacgaggaatccgagttggtcggcccagcgctcagcacagcggtcgcttcagcggtcgtgccagtggccgcttcgccgtccgctctccctaacttcagagaaggcctgtccccgaagactcagccagcacttctctgtcctctgccgctccctctgccgctccctctgtcgctccctctgccgctccctttgccgctccctttgccgctccctttgccgctccctctgccgttccctctgcctcttcctgcacagctcgagtaagcacgcaagccaccgtgccttctcgcgcgccctccaacgctcctgccagcgcgtcagcccaaggtcgagtagtgccgtcatccgcttcaccacgggcgtcgccgaacgcttgggacaaggcggccccggcgggctgcagcagcaccggcgctggccggacgcttcaagagtggtcgagaaaggcgactcaaccggttgtagccaagtcacgcttttctgacgcgccgaagctgtcgaccgacccccggaagcgggtcgagacgccgagcgctccgccgaatcgcgaaccggtcgcctggacgtcagtaccacctcctcaccttttgtcgagtcggtcgagtcggctggagacgacggtccagcaagaatcgttcctgccgcctcgatctatagtccccggctggtcgatcaaggcaccaaaggcgaggccgagaagcgacctctgtcgcatggcccgtatgacagcctggccgagaagcgcccgagattcgacgacgatcgcgtccgccagaatgccgaagcgtcgggcagtggtcggtcgcccgtcgtgactaccctcactggcccgaccgcgatgcgttggcctatggtcgtcaagcaggaccggacgtctcctcggccgtacggctcgccgatgggctgctctgccccgcagcagcctgcctacgggtaggctcgaggccatcacgaccgaggttcccagcagcaatcagattggtggtcggtccctcactcgcagcaaagacccagccaccctgatccgccgcacgggcagcatctgcctcctcatgactaccgccgccagcagtgcgttcacgacatctgcttcgtcggcgtgctcttgctcgtgcggctactgacgactcttgcctcgcctcacagcgacccacgcaatgcaccgtcacgcaactgttacgatagtgattccgcttcctcttcttctcggtttggcagctcgacctgaaactaagccaggccagcctgcgagccgacctgagcgggcgaggatgacgggtcgacgaaagccttcgtctcggaccgccgactgatatcactctcacactccttgctcactatccgatatctcgccttgctccctgtgccttcagttccctttgtacttgatgtcgttcgaacgagagggcgacagccaaaaggggaaccgtcggccgccggctagctgctgctcgcgcccgccgccttcggaccgccgctctcgccgaccccctttcccatacatccgacgtcgatcaccttttcgcccaccttcgacagctggtcgccctctccatcctctgaaccaccaccagcttatttcaagcatgtcgtcggccgaggctatcgtctcgccatcaccggctgcgtcgctctgccggcagtcaagcgcgagccagcggcgtggactgtgtcgcgggccactcgtgcttgttcccccttttcttgcttcgactcctctgctgtgctctgtctttctgaccgtcttccgcctcttctctcagcgactgcgtcgacacctgccgaggtgccgacccttaccaacggaccggcaatcaagaaggagccccaaacgacacctaagatggaggccgcgattgaaacgattcctcctccgtctgtcgacccgcctgctgctgcggacctcaaacctctgaccccggtcgccggcccatccacctcggcagccaaagctcctgctgccctcaccaaaagcggctaccagagttacctgtgcgctttgacattcttctccgagccttgcccggttactgaaatgccttgtgcttgcgcaggtggctatccgctctcgccacgagtacaactcaactacgtcgtcgtcggacgagggcgacgagtccgacagcgacgaggatttcgcggccgggcctggcgcatcgtcatcacgccgagcgtccggtcagacgcccggctccggtacacctcgagtccggaacagcggcagtcgcttcgtacacaagcccagcattgaagctccgtcttcggtagccgccgtccgaagtcagccgatcaccgagaccaagattgccattctcgtcgcactcgggtcgtcgcccgcgcccgtcttccccgctccaggcgtgcagatttgcaagggctacaactcgaccggcgcctgctctgcgacgcgtgctctgacggccgatgatttcatcaacaagcgcccggctggggtgcgagacctcaagtcgtgcgccttttgtcgggtgcatcggaatgagtacgtgtcgcgcgaccagtcgggctacggaccccggcccccggcccgaccagccagtctgcggcggcgctgcaacttctgtgaccctgagaacgacgacgagcgggagctgatgtacgagggtcggcctggcgacgcagtacgtcctgttatgccctgtacgccgcccagtctgtcgcgcgctgacatttgctggggatgattgcacctttcaggtgccgctcgtccgtcgagaagtcgagcagcaactcgcggtcgtcggctcggtcgccggcagtgtgggagccactcattaacctcgcgtctcggagccgtacgatggtcgagccgccggccccggtcggcatccccgagcgcgtccgttcgcgccaccctgtgcctcccctcgccggcagcagcaaggccatgccggctcgctcggccccactagtgcaggtcgatcacaagctccgccgcgtccggccgacaattttgccgccaccttccctggcccgcgacaccttcaaggtgatgcagaatccgtgcgcgtacgaggaggtctcgccctcgcatccgagccagcaatcgcccctctcgcggctgtcctcctacccggtccagatcaaccagccgcccgcccttccgttttctcaagtcgaccgccggacaagcgcaccatcgctcgtcgctcacttcgacctcaacccagccttggttcggcacgcaccactgcgaccggtgccgatcatgccgcgaccgctcaaacggagcgcgaaaactcgaccacgatggaaaagggaggcagacgaggatgccggcgccgctcgggccctgctacgggtccgcctgtggcttggtctcggttggctttttggttcgggcgcctagacggggacgggcttgatgcagatgataacttggctcagcagtgtgaaggaaagggcgacagactggctcatcgcatcaagacgggaggctgtacaaacgaaacaggagagcgaagttacataggggctggcggaagagacgatgcagtctgtcgcttatacacatctgacgctgccgacgacccgatccccccgcactccccctcttttgagcgtccccatcaggggctctcgtttcacatatcgacccgggcctggaacgtccttgcttgccgctcgaggaacaaagaacatgagaggggaaagcatgggcgcaggcctagtctaacaaagggcaggacagaggaggaagcgaataggaaagggagacgtcgtgacagtaggtcggatgcagggcgagatcttggagtgaattggagagacagtgtagggctggacgggcgagataaagctagaggaaagcagaggaggaacgtgtgatgcgaagcgagtcggcgcgtgtgcgagagaacagagagatgtgggtgtcggtcgagcagccgattgcagaagagaagccaggcttgcctcagacggcgtgcgtgtgctttgacccgtcttcgtgacctggcgtgctggtcgatcgagcaatgataattgaagaggccgcagagggtggggtggccggcgacgacaagctgccacgggcggcacgcttccgtgccttgttgagcgccttgcgctggtccttagtcggcgcgtcgctgtttcccgccggtacctcctctgccggcacggcgatgagcgggacgggcagcgaggccgggacgagctgttccgggtcggctgccttgagcgacagcgcgctgaggccgagaatggatgtcgagcgcgggaccaagcgcggctgaaaggcgccgacatcgcgcccgtcatcctcgtccatgacgccgaggacgagatcgtcaaagctggcctcctcggcgacgagcgcgcggtagccctcctcggcctcgtcttcgtcgtcttcccacggctcgcccgggtcggtcgatgagctgcttggtccaaaggagtccgacccagccgagggctgccggaagtcagatgggtcgtagacggcgccgtcttcgaacgagaggccgccgccgccgctcgaaggttggccagtcgacgacctccctcggagctgccgggacgagtaggagcccgaagggctcgtgatgcgattgacttcctgccggacgcggacgaggccgtcgccgagcgagcgcgcgccgacgaggataggcagaccgacggccgacgacttccacgaccgcggcgaggtcgccaggccgtcgccgttcgggtaggatggtatcaccggcttggccgagagttcgcgcgggtgcaggccgaggggcgaacccatggctgacgagaggggctcgtagaacgagtcggtcgacgacgaaagggagggcacgggttcgagggccggcgagcgcgagacgacaacctccgagcggacgaccaaacggcgcgtcggggtctctgcgacggcaagcgggaccttggctgggatcgccgtggtctgaaaggtcgagaaggagaactggtgagagaggtagagcgggcccgaaatgattcgcagagacggcgtcgacgtctcgatctcggcgtgcgagagagcgctacgagagcacccggtcaagggttagcaacctaagcgaggctgagaaagggcaagatgacgagactcacagagcggtggcatctcgagctgacggtcggggctccgccgctggcagcaacgaaagcggtagcgagctgacgtcctcgacgaggtcgccgatctcccagcgagcgacttcccactgcgagccctcgccatggcctccgtcgaggatgctcgacgtcgaagcggcgacgagcgcctgcgccttgcgcgaggccgagatcatcaggctgagcgccgagccttgtgacggcggtgacggcgctggccgagctttcggcaccgatgcttctcgcggcggcacgaggcggtggagggagatgtgctggccgtcggtagagttgaaggcgacgaggtcctgtgttgccgacttgctgccgcgggtcgcgacgaaggcgaagccgatctcgaggccaccttctggcgttggtggttgccggatacggacggtgacgtcccggccgtcactgaggcccggccggcctggatcgagcagccagacatgcgtcgtgcctctggccgtcttggaggcgacccatttttcgtcgtcggaccaagcgacgccctcgagccgagccggcgtcagtccgcggtgcaggacgtgggtctcccagagggacgtctgactgcttgacgagaccgcaccgggcggtcgcagggcgaggatggagaacgagtagtgtcctgccgtcgtcgagacgagaagtttggacgacgagggcgacaatgagagcgttgagacgccgcgcgatgagaagtgggcaagctggcgcgatgcagatccattcgcagggtccgctgcagccagtaccacgaccgaccgcgcgctgctcgaggcggtggtggacagtcggcgagaggtgccgcttgcagaggccgagaccgaggtcggatctacctgctcagcatcggctggatgagctgaagacgcggcgtcggaccgccggctccgtgcgaggttgctcaggccggcgacaccctcttcgagcttacggccgcctactgacgaccgcaagatgggggcgccgtctttacgtgccgactcggccgaagcgtaggcgacaaggcgccctcggacgtcgaagatcggcttgcggttctcgtctagggcgacggcgggcgcaacaagggccgggacgacggcttccaaggtcctcgggtctaggaggtgaagcgctgacggatggacggtagagatggcgatcaagtgcgacgccggcttgaggtcggcgagcgagcctgcgaaagaacgcgaagcgatcggcgcgagtgacggcagagacaggagggtgaccgccatctttggacgacctgcgtctggcgttgtctccgttctgcagttgtgatgaggcgggtcagaattccgtcagtgaaaggggaagaaggaagctcgaggacgcacacgacgacaagcgaccagtcggttccgctgaccgtcaacggcggcacgatccgagcaccgaccacagcacctccacctacatcatctgccgaaaagcggaagacctccttgagctgtggcccggcgcggccagacgagggcgggaaggtgaagagcgagacggacgaggccgtgtggaggacgagggcgctaggtcgcgaggtcaacacgggtagggtcagcgcctgcaaagtggctggtcgggaaaggacagatgagctgctcacgtctcaacctgggccgaattccatcggccgggcatcttgtcaaaggcgccgcccgaccagacaccgacgcgggcctcgtccgccggctgctgcgcctgcggcggcgcgtcagcagcggctggtgccggccggcccatgaagccggcgagcgagggaagcgacgagagcgtgctcgacaggctgctgactgcagccatggcggatactgtcgatgggagcgccgactgcgagcttggcggcgacgagctgttagagtcgggtcggtcagcgggcgactcaagcggtgaggcaggtgacgagtgggtcgcgccggctgcagacgagccgcaggcagggacgcactttgtcaccgtcgctgggagacaagtgcaggtcgagatgggtgtcagcgagagttatcatgacagacggactgagagctaagcgaccaagggcagagcttgatgacgagctgagaggcagcaacggcacctctccagcagcacgacggggacgcgacggtggatgagctcggccgaggtcatcacacctgtcaacctcgccccccttaggcgtcatctctacgccatccagggcctcatttctgccagacagtcacagagcaggctgaagagcagaaaggaagccgagcagggcttaccgacgatctggcggcccatcgcacagctggcaacgtcgcgtcgccggtcggccgcgccgccgtcacaggtggagggaggttggatgccggccatcggcagagggctgcagtcgaggccaaagctcggtgcaggccagtcggagagaggaggctgaggtgtgcgaacgagagcgtgggtcggatgggttgtcaaagttaggcttgatggtggatagagggccaggagggagggccttccctccccgtcgaggtcgccgccccgccgagacacccaactcgacagagcgtcgttccgacctgccttctatctcttcccgggacgggacagatcggggcagactgatcttacactagttggaggagcgccaccatgtacgacaggacagcctatcgagggtgggagggtcgaggcaagggagagaggccatgggcatgctgcgcgcgaaggcacttggcggccgaacagagccggccgaccatgtcagcgacgcgttgatgaagacgaatgctcagcttgcggccgtcagagggtagacagacggaacgggaagaaccaagtagccaaggctgtggcagggcgggacgacgtcagagcgagcgggcaaagggcgtgcatgcgcgcgccgcccaacgtcgctggtggaacccgtcacatcggccactccaacggacgacgacagagagacaacagtaatacgagaacaatgaaggaagacgggaaggaatatagcggtaggaagggtcgagccagagtgataccgttgggctagcggatcttggcgacaaacgggttgagggcggaaacctcagacttcttgttctccttggccttagcaaaggcgttccagaagctgcagggaccaaggacagtatcagggcgggcgagagaaaagcgagggacagagcagagggacgtaccggagagtttcatcgccggcgccggtgcagatcgtctggccgtcggggctcatggcgaggtagaggacgcggtacgtgtgacccgagagcgaggcgacctgcgtcatggccgggtacttccagatgcagaccgagttggagatggcgccgttcgagaagccgtgggtcgagacaatctcattcgacgtcttggaccacatcaggttgcaaacctggtcggcccaaggaaggatgggcagcagggcgataagcgagccaggtcttcagggagagcggaccagagcgactgacctgcgagcccgtgtcgatcgagctgagctgggtaccagtcagggtgttccagaagcggatccgacgatcggccgtcccgccgccggaggcgaggatcccgcgctggtgggggctccaagcgatggccttgacggccgcgctgtgttcctcaaacttccagagcggctcgccgccgtcaaagcccttccagacgagcagcttattgtcgttaccgccgctcgcgagttgaccgtcagcgacgttccagcggaggccgcagacctcctgccgatggccggcgagcgtccggaatgagtgctcgggcgcgcgcacgtcgcggtggaggatcgtccggtcgcgcgagcccgacgagaggactgactcgttccaggcgaggcagccggcccgggccgtgtggcccgtcagcgtccggatcttcttgcacttttcggcatcccagatctggacctcgcctcggtcggtgccaacggcgagcgtgttgccctggagtatgggattcatgtcagcaaggccgcaaagcagaaggagggcaaggacgactgacccggccggtccagctgatactcgtcacgcggtcggccgtacccaagccaccaccctcgactccactggtagcgctctcggccggtgagccgctcctcgtcaggtcgcagagcatcgtcacccgactcgtgttggcgctccacatgtagacgcagctgccgaggccgacgccgaggacgttggtcgcgctccagtcaacgaggttcagatagtagtcgtcggcgagctcgggtgcgtctagcaccttgaagggtcccttggagatgtagcgcgtcggcttgcgcggcgagagcaggatgttctgcgagaccgaggtgatgggcgagagcgagtaggctgggtgagtcgggtcgtcgaggtcgaccgccccacctctcggcgagcccttgattggcgaatggacgcgcgaatggccgtgtgagagtgcgtgcgcgttaccgggtgacgagaacgtcagcagccgcttgcggctgggcgtcgtcggcgtcgggaacggcgagcgcgcggcccgggtcggcgaagcaggcggaaacgaggtcgtcggcgtgccgcctatcgatggtccggccgtcatcgaacgtgaccgcggcgaggggaaagcgtcggcgtgcgatgggtacccgaaagccgaggacggcagcggtggcggcaccgaatgtggtcggctcgggagcgaggtcgtcgtcaaaaagagctccgacttgagcaggtgcgagaaggtcttgttcgcctcgtctatcaggcgtgatattttgagcagggtcagcggagagtgcctgagggctcgccgaccccgcttggaatcagcacgcacccctctggccgtcgagctcgacgctcgcgccgcgtttccgcccctttgggccgaccgcaccgctcttctcgccgtcgcccgagccgaacagagtgtaggcagcgtgcagatcggtaccatccctcgtcggaatgaagctgcgaggggccggatgatggtcagccgacggggttgcctgcggatggccatgaaaggggcggcggccgaagaagcttggaagggaaggctgccaaggaggccagaaccggacgcaccgatcgccatagtctcttgctttcctcttgcccgaggccgtcacgctcagacctccagctcctgacgtccgttgaggcgtcccactgctactcctagcgttgccggagctcgcccagctcgctcccgtcatcgtccgctccctcgagctggcgccgccatccgcttctgcaagaccgtcgccgagccgcgggttgaccaaggctgagagaccgagcatcgccggcgccgtgtaagcgtggacgggcggcggaggcggccgtggatgcgacggaggcggaaggtacgaggtcgatgcctcggcgttggcgacgacgcccgtcgagccgttgttgaccgagggcccggccgtcgcgcgcagaaaggggaccatcctggggcggacgctgagatgttgcgcctggctcggcgtgcggcttggcagctgacggcgggcttgagctggatgccttcgtttcggcgacgggacggggcggggctgctgcaaggtcggccgagcgctgaggatcggagcgagccgacgtgcggtgagcgtgctgccgtcggataaaacagaagagacgccggctgcttgaaggcagagagctagggatggtcggtctagtgtgacagcctagggccgctggatgctaagaaagaggtctggatggatggtacagagggggacggggggggttgctgcgagtcggtcggaacgacgccgccgcctccgcgcgcgagcgtgagacagccaggcccagcgccactgtggctgagggccgttgggaagggagtgacgagtcgtctctgaacgacatgcatctgacagcgacgggcgggtctatcatggtcgacctcatcatcgccatcttgcaacttgcggcccgacttggcactaagaggcgacgtcgggcgcttcggccagccgttccgctcgatccgacgtcttcctctgcaaagcaccagccgagcgagaagtcattacaaaggcaaagcaggtttggaaggcacgagggcatgaatatagagatgtcgatccgagctttaaaggaccagaccctctttggatggatggaggggccggtgagtaatggcaacgttgttctggctcttcggtaaataggctaagagtggcgctgagaagccacaagccagagtgtatcggagcacgatagggaggaagggcgtgagggtgaggggaaagaggtgagaggggaaagagaagatggagggacctgccggtgggccaaccgcgagactgagccagtccgcgcggtagccccaagagcgcttcaagtggccgagttgaaggtcgatccgggaggcgcaggtctgtttcccgcctgtgaagctcaccgctgtagaacagagcggatcggcaaataacgggaggccctcctcactcggagcccgtgagacacgagttcgagcggggagggatggggtcgttcttcgcacactgaatgaatggtcgacggcacggggtagcacgcgagcattaaagtgaggtgtgcggggaggttggaaggaggggaggaggatcggccgtcgagtcgaatgtcgagatgtcggcggtcggggtcagcaagatcggttcaagaggcaggctgaggaaggaggcgaaaagtcagcaaagcgtggcggtggacaggagacgacgggaggactgaccaggtgcaggtcagcaggtcgaggtgccatcgagcgggcttgatgggcgtctgacgatgctgagagctgaaaagacggaggggcggctttgaggggcggccgaagcggtgcagctcgtgcgccgcccgcccgcccgtccgcccgccgtgctctcggacgcgccctgctgtcagcctgtcgtctcgaccgacctcgagcatcacagtcaccaatcctctcactctcgctcgctcttcccctctcttgctgctcgcagcctcggctccaagctcggtgtcgcacgatggccaccctcgaacgaccccgcgacgcaccgcccgccgccgatctcaacggccgcttgaatgccgacgccccaagcgcgttcccggtcgacgagctcgtcgccctccgcgagcagtcgagtggcccgtcatctcaagcggagaccggtgctggaccggccgagcggcagtcagagatcagggaggtaggtgagctaccgctttcgttcttgagccgccgtcgactccgtcgcagcaaccgactgacgcgctcctgcccgctccctttgacgacgaccgcaggcctcatcgacggcccctagggacccctttgccgacgacgctcggtccgatgccaaccacacttccgcgctcgacgatcatcaccacccgccgtcctatacagacgatgactcacccgtgcccgactaccaggagcgcacgccgagtgccgccgccgccggcacagacgaaggcaagcctccggcgacgcgctcggacgcctccgccatgaccgacgacgacttccacccgtctggcgtctcgctcctgaccgagaagaggcggcaagactttacccacctgtcggacgcgatcgaccggctcaacgtcgttgctccccagctcgacaatcagcgcgtcgccctcggcgagggcaaggcgtccgagctcgagctcgcacggctcgtcggccgcggccggatggacgaccagtacgcgtccgtcggcagtaagggcaaggcccgcgcagaggcgacggctggcgacgaggctgagctgcacgagatctggcagcggatcgagaaggcccacggccggcggatcgatggacaggactcggcgccggtcgaccctgaccagcttgcgagagtcgaggcacgccggcggagcgcttttatggacacgctggcggaccggaacgatgcaggccggctcgacgaccaagattggacggcgagtcgaggcgcgcaagaagccaccgacctgcttaccgtcgaccagtttattcaggaaggtgcggctctttcggctgagtgcgagctccagtgagacaagaaggcccgaggctgatacttcccttgttgccgaaccgaatagaccgccagacggcctcgagttcgtcgacaccggtcgccctcagccatccgtcttcgccccggatggtttcagcacccgacatcaagcggctgtccgggtcggctgtccctggtcggcgaggcagcattaaggacggctttgtccggctcgtcaaccgcaatgggtctcctgacgacgaacatagtgaggcccgaccctccgaatgatcgctctcgcccctcccctctcccttccgtcttccatctctcctcggaggacgccggctcgtccccgggtgactctcgcgccccctcaccgcccttcctcgaccttgcctgcttcgcttgtacttactgccctgcttcgcccaccctcctcacaatgggatgacctctgacgcctcacctgcttctgcgccgccagcccgccgacggaaccgccgctctgctagcccgtctggccgcaaggacgtctcgtacgtcgctgagtaccagcgcaacatccacgtggtccagatctcgctctacgtccccgaaggcggcgactttcacctcgacatcccgctcgacgacgcgcggacggcgatcctcgtcccctccaactcgacggcggcgccgctccgcctgacgcttccggccgaggtcgagccgcagacggacgtgctcgttcgcccgtcgtcggtcaatacctactcgttccgactgcgggccgcggctggcgcggtcaacactgacgacaccgacggcgaccgaggcgcggtcgccttctcggtcgacagcctggcctcgacccgacccgctgccttccagtgtgcgacgtgcgacgcgccgctcgtagactgcacggccgtcaagccggccgactatagcggcctgccctcggagcactgggaggagctcatcggcagctggctttgtcacgacgaaatgaagctcgacctggggaacgaaggcgccggcggcgtcttttggccgcagacgaacgaggtcctcgtcggcgggacgtacctcatgctgaaggaggcgctcatgatcgtagaaagctggcggccacggccgggcggcgaggtgtgtccgcttctttgtctctgttttgcccccttttccctcaccggaccaaaagaagaccgccaccgaactccatgggtggtctctcaccccgcccgtcgcctggttctggtgtctcggcgtctgcatcgcggtcggaaccctcgcaggatctggctggttgcaggcgtctagtcgtcggatgcgcgacgacgcaggttgggaggcggggcgcgactcccccaacaagggagcgcgctcgctgcggttgataacagtgtccgacagtagatctggcttcttgaaacaacccttggtcgtccaagacccttgaccaggggctacacgagaagacacatgacctctctctctctttcgctttctcaaccgcgacgccaatcggaactgacgcttgccgctccttcctcgcagagtgaactgtggcagcccctgatctgctcctcatgcgacgcgccgatcggcaggcgcttcctccaaccccacccgacggtgccttcatcgacgatcaagctgcacaagtacgcgatccagctcccaggccaagccccgccgcccttctcggccttcctctgccagaacctgctcgagctggccgactcacatcgatcgtaccactttatcctcgaggccgaagacagcgaaggctcgccgcggctactcgttcgtcccccaacgtgcttacgcatcacgctttaaccaatactgacgcatcttgcggccccttcccttgtctacagatttggctgttcaacacgtcggtcatggtgacggcgacgtccgaggacgaggcatcgcggccagtcgtcccgacgcgcgccgccaaggtcctcttcgcccacctgagcggcgactcgctgacacggtcagtccctgctgacgctgcgccttgtcgctgctctggtcgctcgtcctgacgcaatcatgcccttcttccagcgccatgccggacacattcccgacccagtcggccgaaacgctctcctaccctgccgccgtcatcggtcggctcgcagccgagctgcagagacacaacggcacctttcctcctgcagctcggcagttgatgggcttcgaagtctcctggatagagcgcttttgagcgcggacgccgagcgcgcggctcggcgtccgcccttcgatgacgatgccttcacaaccagcttaggcgagctcgcgccgccaacaagactgcgaggctggacgggtcattaggtagtgaggcgagcctagtgtgcagtgagggcgggcagaagcgacgactggaaaaggggagacggggccggagcgggcgacgtgatggacatgggtgggccaaaaggacatggacgagcgggctacaaaggtcggctgaatttacaatcgtcacggggacgagcggggcgagaggagattgcgctgccttaccaaggccgaagcgggcttctcgggatcgatggaagcgacgactggttggcgaacgacgaccgttcagacgagacgtaggacgcggcatcgaggtgcggccgggagtggaccgacgcctgaagctgctccgaagaggaatgtcgccgagcgtcacccaccttcgatactggcgcgtaggcccccgaggccgagaaggaaggcaagccagcgccggtggtgatcgacgggaaacgcacgccagagtcgagagctggcttgccagtcggccacgagcggcctgcgccatcagatggaccgaggtagacgccgagcgtcgagatgaagctgccctgacgcgaacgatcgtccgtgtcgtcgcgcgagttggttcgaatgacgaccggatcgagcgagccatcggccgtccgcggtgacgagacgccagacgaatgcgccgagaggccgtcgtcgtcgcgctcggcgtcgacctgcggcagccggtgtgtggcgggcggggcgctcagaaggtggacgccgctcgggggcgacgatggtccgcgacggtccgagattgacaggccaggcagcgtcgttcggagcggcgaaggtagcgagtcgcggcggaagtagccgaagggtgagctcgacgagcctgtcgccggcggcgtccactcgtcgcgatcgccgagcagccgcttaaactgctgcgacccgcgccgaggcacggcggcgccgtcgaggaccgacaactggtgctggtcgcccgagattggcgaggcaaacttcgcgccgacgagcggcagcggcaggctaaacggcgtgtctggcggtgtgtcgccgtcgagcagttgcgcaatcgagaaggcgctcggcgtctggccggtcatgacctggagcggcggccgtcggtcggcaaagctcgttgccgttccaggagagaggaggcctgacgagggcagtgggtagggctgcggcgcagcttgcggcggagggaagcggaacgcgccgagggatggggctgagtgcgacggctcggctaccgggggcggtggcggcggcgaaggatagtaatgcaaagacgctttcgggtacatcgtcgaaacaccgacgggcggcggtggtggcggctggtagtgacttgggaagagagaagccaggacgggttgtagaaccggcaagggcgcgttgtagccagtgtaaggcgagtagcgcgtcgagccctccggtggaccactgtagcgcctagatgccgaggcggcagccggctggtcgttggcatggcggtagtgtgctgtcggaggagggtgggctgctgccggtcctcgaggagaggaaggagcccgtcgagcctcggtcggagcagcagccgtccgcttttgccgaccacgtcgagtcgacgtgccaggtgcagcgagcgtgatctggccgaagcctggttgtgagggcacgatgcacgaggcaggaaattcggctctgagggcacgaggacggtcgacacgacaggtcagtggtctgatcggtcgatgagaggaagtcgagatgcacgcacccaaagagcgggacgagggcatgccggatcgggtacgcgacacggcgcgacagattaagggcaatctgcatgaaggaacggccggcttggtcaggatcacccagtagaaggtatgcagacgatatgcagagaagcgcacgtcgtaaggcagccaggtcccctgaatcttgaggtagccgccgcgaaccttcttgagcaggaggccgacctcgggctgcatctcgaccaagcggaccatgtcggctgccgatttggtcgagcaatgcgagtcctcagcgagagctccggcggagaagataggtggctctcgactcaccctttgagttgccgagcagcttccagatgcttgtccagtgaacgaggccgttctcgctgtcaatcatcatgaccctgacggagtggaggaggcgtcagcaactgtttgctggcgtcgagtgttgctccagaacgcactgctcgccgagcgggaattcgaaaacgggaatgtagccgcggacgtcggcgctcgtcgtatactttgcgctcgaaacgatgacgccggtcgtcggatcgtttgtcggccgacgttcagcctgacgggcgagctcgcgcatccggtcgagagcctcttgcggaccgttgcccggctgggcgatgggcaggaaacggacgagtgctgactgctggcgctggagctggtgctgatgctggctaggataaccgcccgaggacgacgaagagccggcgccggaggatgcgagcgcttgactgtcccaagagaaggaggacgacgggccggcggacgatggcggcggcacagcgctcggcgccgcagagccggtggtcgaagcgatgaacggcagcggacagggctcctgggttgcccgggccgaggccggcgacgacgtcggcgagacagacgacatccgagggcggataggaacgaggctcaaggatgagccggcagtcggtcgctgagaagagttcctttcggatggatgcgtctgccggaagcaagggttgatgagaaaggtcggctggcgtgatcgggttgaatctgtcggggccgagggaggaaggaagaaagaaggtatcagcgcaagccgggaagaatgcggaagcaagagcggccggagcaccgcaagcccttctagaccggcacacgactgccgaccagaagaagaagacgtacgctacagtgcgtgagaaggctggtaagaaaccgggaggtcgggggtgccaaagcaggagcggcagaggaagggccggagggctgaagacgagttggacgatgcagcggatcgggactgggctgccggaagttgcgggctgcgttcgttgggccggacgttcggcgtctggctcgttcttcggacggtcggaggggaggaaggttccggctcggtgagggcgggcgagggatgggtgaggagaggcacggaagaaggaggtgagagagtgagccgactcgtcgctcgaggtcaaccttcggggcgctctctctcgcctcgctcgctctcctctcttctcggctcgccccacctagcaggccgtcccggcagccccttggacgtgttgatttggttggggcttgggcccgccggggtcggcgcacgaggggcgacatgagcgaacgcggagagagaggaaggacatcgaaaccttgtgtcggatcgacggccgaagctcgttgcctcaaccggcgcccgcgccgctgccccggcaggcgacggccgggcgggcgggcgtgagatcagagttcctccggacgcctccctttttgcgctgtgctgctccttgtgggtctcagccgaggtcgagaagggaacgacgggacaggtggtggcccgagcgagcggcggcggccgcagcagagagagacagcgcgtcggcctcctttcccgcggcgcgcgcgcgtgggtgtcgcggagcattctaaggcagacagcgagtagcaagcccggcagaggagcgagtctaccagcaatagcaaggcgagcagtacgagaggcaagagggcagcaaggcctgcctcggtgggcaggccgatgctgagcgagcgagatcactttccggccgtctccccgcaaagcgtgcaaagacggacgccgacgcctccctttcgacttcccgaagaacgcctcgcccatcaaaggaggtttggcgtcgagggttaccaaacacgatccgaggtcgccggtccgggtctaaggaagcgcggcacgtcgtcgacgaaatccacgctgtgagcaacgagcgagcttgcaggaagaagctgccttgcctgcgtcatctgcaggtggcagcagagccgcaaagcagagtagagtgtcgttacaggccgagctaacggagctgaccggcatgtcggaaggaggcagaggctacctgcaggcaacggggaccgaccgccctctcggaacgccctcgtcgcagctgacgaagtggtcgcccctttgatctttgctccttgacctgctggcgtcctcgctgggttgccggccttttcacccttcctcgaccgacgaacacgaccagacgtccgggttgtccgccacgtctggtcgtgtccgtcctcggctccaaactccaaaacccgcgccggtcgtcccgacacctccctccttctcgcggtgggctcgcctggccgacgaggagctcgcccgggagcgcctggacttaaccggcgagagatcggcaagcaagaggcatgccgaggccagcccacgggtccggcgtctgctagtccacgcacatggaccatctccaacgaagaggggaggtttggcagcagcaagcagcagcatacaggcaaggccgagtgcgaccgagtcgagcttgagcgctccaacagccactcgctccttcctttgctgaccgctcaatccatacacgcatcgccttcaccagcggcggccgagctcaccaccctccgacaccgctgatcgggtctgagaactcacctgcacctcgcgtagcgccatcggggtcggtctacgagcatgcgtggagacggtctctcgtcggcgcgctcgacgacggccgcctcttcacaacgaccgatccacgcacgacccgaccgacgccaaggcgactggcgggcccggtcgatcggctcgtccgccggagcagccggcgctttcgaacttcaagctgcgaacttcggtgacggactttcgcgtacgaggctcagggcggattgactactggccctttggcgagcggggcacggaaagggggagcaccgaccgccgctcacttcgtttggcaggtaggcggagaggcgctcccggtgctgctcgcaagtcacaacagggtccgacggcggctcgaagcagccggtcgtgatgcgcgcgggttggatcgtcaagcgcagaggtcacatctgcatgaaggggagcaggggcgctgccggcttctctgttccgaacgggtcagtgcgctgggcgtcgactggcggcaggaagagagaaatcggcagccatgatgatctgggcaggcacaagacagtgactttaggcgaacgggcgaccgacgagcttcctgccgactaatgcaagctgccttggtcagggcgccgctgctgagccgtggccgtcagagccaatggtcgacccatatgactcgtgcgcgcgcaagaaaaccggccgagggtcggaagtcggctgaagagagagaagaggccgacagctcgtcagactccccggcctactcagcgagagagaagggcaagacgcaagcgactgacggtgagaaagcccatcgtctcgctactctcgcgcgcagcttgctcgtcgaccgtggggcgaacgacgacgacggacgacgtccgagtcgcccaccgaaccgactccttgagggtcgacgctgatttttgcttcttaatcgtcctgcgtgctgacaacggcgacgtcggaaccgagaggcctcgaccggcggcgagcggttcgggcaccggccgcttgtacgactgcgagcgaacgagctggcgagatgatgacggcctttgggagacaaggcctgaacgctggcgagtcggcgtagacgctgttggccgtggaaaggcgagcgcgagagcgagggacgagccgaactcggctgcgaccggcgtgagcgccgaaggcgacgagaagaaggggtcggccgccaagggtcgagcgtagttgcgcacggttggcgtcgtcaagtcacttgtcgctgcaggatcgtgaaggccgagcgcggtcgaaagagtgccgcttgagggtgtcgagggcgaccagtcgatgtggcggccaacttcaagcgttctgctgcccctcgcgctgatcggtgcgagagtaccctcggtgtcgccatcagaccgggcgtactcgacttcgccgagccggaggagcgtctgcgcaaagttgaccgtctcccttttgaggacgagtcgtggcggcttctccgccgtagaagaggctgagtcgacgacgacgtccggctgatcgtcgtactcgaacgcggacgagaaaggccggctcggaaacttgggcgacgagtgcgtagattcggatgaggaagagtgggcaaactggccgaaggtcgggacgtcgatgccgaggacgcgctgaagcttctttgctgaagcgagcctggcctgcagctggctcgacggcgaccggtcggtggacgagaagacgcgcatgttgactgcgacataagttggaggcgtgaccagggcagaagatgcgccggataacgttggtgaggatgccgagagcccgaagtcgccttcatccgacagcagagctaagcgcgaaggcggggtcgcgagttccgagcaaccgtcgaccggcagcttggagggcagattcgccagcgagcatgagtccgagacgggcgaaatatcgcccaaggtcgccggattcggtacacgcctgagcgcggcgttgcacggtgatgccaactcacgcccgtgccctttagcggcaacagagttgatgccgacgagcagagagtccgacgccgtgcgtccgacggatccgacgtgcactggagcaggcgtagtcgactgtcgtagatcgctagggtcctcgtgccggcgccgagtggagacggcggatgggcactggctgtcgctcgtcgtcgtgaagcagcgaggccgccggacaaccgagagcggaggcgctagctcggctgcagtcaggttggccggggccttgtccggaaaatcggaggccgtcgtcttgaggggcgaccagacgagcgcgcgtagggccgggagcgatgactttttcttgagcagccggccgccgaggagctggctgcgcttcttgtcgaggcgggggattgcttcagcagatgaaggcggcggaggctcgagcggcgtcgtcgccagatggtccgtcaggtcttggccgtccttctcgtcggcaaaggtcggagcaaagcgagtgtcgaatggtgtcgaagggttcgacctagagcacgcggacgagaggccgtcctcaggccaaggaagcgtcggccgaccaccgtcaggcgctgtctgagccgtcacggacgacgcgctgcgggtgcgcgtcggctggccctgaggccgaaggtaggccgacttcgtgtgtcgcagcacacgcgtctcaccgctataggccgtcgacaccgcgagatgggagggcgacggcaaaggtgaaggatggccgaagccggtcgagaccgagaggtcagagcttctcgcgcaacaagctgtgctgacgggcgagagccgcgaggtcgagtcattcggcagccgggtccacatcttcggcaagtcgtggccgagcgccgttcgggcgctggcaggctggcgagaaggcctcgatgatgcaggtctgttgagccatccgcgaacgtcctcttcgttcgagctatcgtctgagctactgctgcttgaatctcggcgatgccgaccggttgtagcaaggtcgacgaggtcagcagaacacgcgctggccggcgcgagcagccttggtccggtggaggacatgactctgagaggggatggcgagcgagtcagcgatgacgatcggaaggcggataccaacgaccggagaagactcacctgggaggatcgagacggttcgggagccgctagcgggaggccggaaagatgagcgagcgagcgcgaaagggactgctgatagcagcaagagcagcgtcaagctttgttcgaaccagccccttcgagtttcgagcttaccttggcggaggcgaaagggcacaaagcgaagaggcgaggaacagacgagctcgaaggacctgtggctgaggcgaggtggtagtcggaaggcaaagagcaaacgaggtcagcagggcctcctccatctccctcgatccgcccgcagacacgcgtcatccgccggccttctgatccccctccaacgccgccgctaacggatcgcccctctttgctcgagaaacaaggagagaggagggggagagtaagccgagagggggactgcgtgggaggcggccgacggagaaaggggctggacgaggaaagggggctcggaaaaacgccaccgaacggaggatccgtgacaggggcggccgatgagaaagcggggcgacgagtcatgcgcgcagaggcgtgctttgccaatcgggtagtcgaagccgaggcgcgcgctgctggtcgtaacaggtcgtgaatatccgcatctcgctcctctctccaactccagcgcgtccccatcaagcgagcctccgtcggcccagccgaggtcggccacgcaaccgtcctctaacggcggaggaagcggccgagcgtcgtctggccgaggatgccgccgctgctgccgagtagatgcgcgaccgaggcggcgtccttgttgactttggtcgcgtggacgacgagccgggcgaggatctgcgtggaggcggagggccagacgtcagattttcggcttcagcgcaagagatgggggagagcggagagcgacgtacctcgcccgcctcgacgcagcacgcgacgacaatcagccagataacgatccacgtgacggtccgcatgccagcctcgtcgacgtgctggtggatcatgtcgagcaggtcgccgacgacgccgagccgttcgttgaggacgacgactcttgcgtcgatctcgaggtactcgcggatcgcgtcatagagcggcttgagcgaggcctcggaccagaagagctcgggggtgtctgaggggcgcataggacagcggtcagcaaaaggggaaatgagagcgagggcgacaggtaaggacgacggaccgaggacgttcgagacgaggttgacctcgacccggagcttaaacaaccggcccgtcagcttgacggcgtccttccggtcgagcttgagcgtgcccgtcatggcgagctcttttggaatgtacgaggccgaggctgtcgtcgactggacggccgtctcgtagactgacagcttggtcgactgggcgagggcgtgcgaaagcgagagcttgaggaggtgcgaaggcgacttgaaggtgaacatgtctgccgaaagaaagaagataagttagagggagccctttgcacgcaaaacggaggggggggggggaaggggaccgtaccgttgaagatccgcggataggcgaccgtcgggttgtactcgaagtggcactcctccatctcccaaccgcgctcctcggcgctctcgcccggctcgccgaccgcgccgacccagcacccatccgcctgctcgcaatcctcgagcacctgacgctcctcatgctcggtcagaccaaagaagaccgagacgccgtagtcgaagaagagggcttcggcgagcttgggcgctcggcccgcggctgtcagcttggggagcgggtgcgtcggcggcggcggcgggtcggacgggtaggggaggaaggagggcgagtcgagctcggccgcgggcgagaggagtggcattgacagggccgcttcgggcgaggacgagagcgacgacgaggcggcggcggcggtcgaggcggcctcttcttcgagcgccgtcgttggcgaagggagcgggacgggcacagccgacgacgtgtcgtcagatggcaagtcgggtatcgagttgctctccatgtcgagcttcggccgttcggcctctccgccctgctgctgctgctcttgttgcgactggccgttcgaattctcgccctcggcctcctcgagcgggaagtaggacccctcgtagccgcgctcttcggcgtgctccatcgcgtggatgatggatccgccgccgggcgatgtgacggcgagcgaggaccggacgttgactgctgggttgtagcccggcaggagggggagcgtgtagctggcagggcgcgcggacaagaggagcggcgtcagcaagctttcggacaggacagagggaagcgacaagcagccacaacgtacacggcgtagagagcctcgtcgaactgcctgacctcggcattgtgctcgcgcttgaggaaggcggcaagcgtccggagccggtagctctctgccgtcgcgtaggccgtcaaccggccgaggccgctccgctcgcgctcctccttgttcatcagctcggcctcggaccggccgccttcctctccaccgccgctcgagctcccggcttgatgcggccggggccggtgctgataggcaggggcgctcatgcccgactgggcggcgagagcggctgccctcgctgcggccgccgggagcggctgcgactggacgtcctccggaaggaagacgagcttctttgcagacttggacgtccgtgccggaagggcgagcttcggcgtcgacgactgggctggcgtgcctttagggccgctcgcagagccggccgccttcggtgcgccagacgacgacgacgaccgccggaggtgcagcggcagggccgacaggggcttgggcccggtgttggacggctgcgagccggcttggccgccggtcgtcgtcgagcctgcgagcgaggacgaggcttgggccgggagcgagccaaaggccgaggccgagatggggcgcgacatggagagagggcaggagggaaggctggagggtgagggtagacaagtcgacgcagccaagcgtcacagcagggcggccagcgggactcaagagttgaggctaagcccatgttgggctccatcggggaaatttccctgacccgcccctgcttggccgctgctcttctgctgcctccttctcctctctcgcccatcttctcctctccgcctccgtcctcgacacgaaacgcatccaccgggcgaccaccttcagctcagccaaacaacccgcggcccaccatcaactaggccttcgacttcgcccgccctcccgcaccctcactcgcgcgcgcgtgcccactacccgcatctccgcccgaccgccgcctcttcacgctctcgttcggccctgcccgacccctcttgcacttctcgctcactcactcggctcgacccagccaccatggcctcgacatcaacaaggtgcgaccctttcgacttgcttgaacgcgcgacgccgagcggacctcgagaagctgaaagctgaatcctcctgtgcctccctcgctttctgtcggtctagcccaccgccggcgcctgcctcggactggaaggcccagctgaacctcccaaagcgagacgagcgcccgcagactgaggtgggtgcctccacctatgcctggccactctgaaggagccctgaatgctaaccgttcctctcttcgcgcccgccaggacgtcctcaacaccaaaggcggcgacttcgaagactatgggctcaagcgcgagctcttgatgggcatctttgaggccggctttgaaaagccgagtccgatccaggaggaggcgatcccggtcgcgctcacgggcagggacgtcctcgctcgggtgcgtctgcggctcttgccgactggcttcggccctcgttcattcccgcccggctgaccctctcacgtggctcctcaggccaagaacggcaccggcaagacggcggccttcattattccgacgctccagaagctcaacccgaagcggcccaagatccaggcgctcctgctcgtgccgacgcgcgagctcgcgctccagacttcgcaggtgacaaagacgcttggcaagcacctcggcataaacgtcatggtgacgacgggcgggacgacgctcaaggacgatattatgcggctcgccgagcccgtccacgtcctcgtcggcacgcctggtcggattctcgacctcgcaggcaagggcgtcgccgacctgagcgagtgcgcgacatttgtcatggacgaggccgacaagctgctgagcccagagttccagccggtaatggagcagctgctcggtttctgcccggctcagcgccaggtttcgctcttctcggcaacgttccccatcatcgtcaaggacttcaaggtgcgcgctcggcgaaccgcctgttgcgtccgtcgcagccatgctgaccccagccagcttgatccctgcaggagaagcacatggtcgagccgtacgagatcaacctgatggaggagctcacgctccggggtgtcacccagtactacgcttttgtcgaggagcgccagaaggtccactgcctcaacacgctcttctccaaggtaagagtcgacatttctgtttcgactgatcagaggacgaaactgacgcccgaccgcatcgttccgccctctccagctccaaatcaaccagtcgatcatcttctgcaactcgaccaaccgggtcgagctcctcgcgaagaagattaccgagcttggctactcgtgcttctactcgcacgcaaagatgctccaggcccaccggaaccgcgtcttccacgacttccggcagggcgtctgccgcaacctcgtctgctcggacctcctcacgcgcggcatcgacatccaggccgtcaacgtcgtcatcaactttgacttcccaaagacggccgagacgtacctccatcggatcggccgctcgggccggttcggccatctcggactcgcgatcaacctcctgacctacgaggatcgcttcaacttgtaccggatcgagcaggagctcgggaccgagatccagccggtgccagccgtcatcgatgcgaggctctacgtcgcgccctcggcgatcctcgatgcgggaggccagcagatgctccagcaggcgcagcaggaggagcagcgccagcgccagcaggagcagagccgcggccagcagcggaggcagaacccccggggcggccagggtcagggccagggcggccagcagggccagggcggaggcggaggccggcgaggcgagaacggtggtggcggcggccgtcagcagcagtcccagcagcagcagcagtagacggcccctctttgtcgcccgtctctctctctctccctctctccctctcctttcatccgaccaccgcccaccccacctctcgaccaatcccccccttcacgtcaacccgcactcgcacaccggcccctcgagagccggccaaagcccacccactactccgctcaccctctcgccgcccccccaagcttccgctcgacaacactcgaaacatgcgagcgcggtcgatctcgtcttcggccttctcgcaacctcccctcaatcggcttgcactcctctgcgccgtttggccccgaagaagggggggggggggcgctgtgtgtaaaactctctccaaaaccaacccaccggctccccgtccctcctcaatccacttttccaacctcctcccgccgtccccggccccgtcagcgcttagctgcgccactcggcgacttctccacccgcctgccctccacaccatccctcaacacgaccttccagcacgctcgctgaccgctgactcctacccttggccgcctcgctggaagcatcgaggccacgccagcatgtccgggctgaccgaggctacgtggccgctcgctgatcgccttaaaggccagactcgtagcactgatctctcctgtctgccaccaccacctcgactcgcccttcagcccacccttcctcacccagcctctcactccatcttcgccaccgacgatgcctctcgtctacgtccccgaccaccactcgcacgcctcgccatacgacttccctccgtcgtacccggcctttggctcgcctcggtcgcacccggcctacgcccaggtcgacccgattgccgcccgcaagcaggccctcctcgccgagtttgctcgctcgctcgacgagcactacccgacggccgccgcttcctcagcttcggctccgatctacggccagtactcgcaccagcagcaccagcagcagctcctgcagcagcaacaccggcagcagcagcagcagcagtatctcgcccagctcgagcggcagcaagcagaggctgccctcctcgaggctgccgagcaggagcgtgtccgccaggcccttcttcgccgcaaggccgccgtcgtcgccgctgccgccgagaaggccgagcgccagcgtcggcacgaggccgagcagcagcaagtactgatggaggctcttcagcaggtgagtctcgcctcaccgccagctttggctgctgcgactccgacactgacaacctttttcctctcaatcagcacgccattcgccagcagcgccaggccgcctacgagcggcagctcgccgagaggcagcgccaccgccagcagctcgccctgcagcagcggcggcagcagccggcccggcaccgggtagaggcccgccacccgcttgagaacttcctcaaccttctcactcaggccgagcaggaggacgccgaggagcgtccgtcggcgcccgcccctgtgtctgcccgctcggcccggccagcgaccgaggacgacgccacggccgcgcttgaggccttcctcggccagctcttcagccactgcgccggtgctccctccccggcggccaagcaggcgcccaccagcccgtcaaagccggctgacgagtcgccatcggacaagccgcagccgccggcatcgtaccactacattccgcatctgtcggtcgccggcgtggctggtcgtcctgcttcgactccagcaccggcaccagcgcccgcccccctcgagcgccctagcactcctccatcgcgcgctaccccggcccccactgcttcgcgctcggcctcgcccgctcggtcttcggccggcagccctcccgccacgccgcactcgaagctctcggccttattcgcacgcctccggtcggccgcgtccgaggccaactcgctcgccgagctccagcaccggctgacgacgctcctcgtcgaggccgatgcgatcgaggccggaggggacgcggcggtccggtcgcgccgcaaggagctcgtgcgcgaggtcgagaaggtcctcggcgcgctcgagcgcaaggaggcggctcggtcggacgttgttgctgagcaggctgaggacgtcaagcctcaggactcggccgcctcgtctgtcgctcctgctccggtcgccgtcgatcagcccgccgccgccgccgcacctgtcggcgaggaggagcccaagcccgagccgttggcatccagcacccccgccccggccgagacgcccttcaccgaccctgcgcccgtcttcatccccatcggctcgcccacgcctgccccgtcccgcaccctccctgacgacgacgacgcccggtccgacgtctcgagcctcgcctcgcccctcctcggcgcgacggccgcacttgacgacgacgcccggagcgcgacgagcagccggagcagctcgtcctcccgccatggccgcaaggcctatgttgaggacgcgccagaggaggatggcttccagatgatgtagccctcccgtcgctctcctctttcttgtctctctcgcccttgtagctcctccctctcacgacccttcttgtctcgcctctgccctcttgcatgttgccatctcttctagccatcttttgttcttgctgcgagtcggtcatcgagtgccaagaggccttgagatcctggctggtctagcgagtcgcaagccagccctccctgtcttcggtcgcgacccgcttctgttcggcctgagtgctctctctcttgcagcccgatctcaagacggcctcggcatggacgataacggactgacttctctctcctcctccttcccccccacctcctcctccttcttctcctcctcctttctcctctctcctcctcttcctcctgctccccgggtggccaccctttcctcttttccctcccttgcactgtctttgtccctcgcccttggcgggagcacggagttttgtgtggactttagcgctggtcagcgagacgtcccggagccctggctctcagcagccgctcctcgtcgatcgcttgtacgaccctgctgcgcctcaccaatgacccgtcgagcctcttactgttttcagtagcgcatatattagagtatgactccgccggccaccaacaagagcgcatcgtctgcgctatcggccgagcgaaaagacggagctcttcttcttgccgccagcgtcggaaccgaccgacatggcgccgtaccgcgagccgggtgtctgagggaagctgccgtcgacagatgacgacgaagaggtcgtctgggctgacgttgacccgcgcgacgaggtcttggaagaacgagcggtcgggacgagagaccgagcgacgcctcccgtccggctcactgcgagaagcgagcgccaccgtcagtgccgagcacaaggaagtaaaatagctgtagcacgcggcgacgaactcatatttgcgtcggcctgcttgcttgcgttctgcgcgcgctcaaagacgcgtcggatgacgcgcatctcctcgcggacctccatcgccgtcggccggcgccggctctcctgggtccacatctggccgagaaggccccagagcttgtcgtcgagcccacgggcagtgactttcttcgaaggccgcgccggccgttggcctgactggatggctctgttgacgagcacgtcagagtgcaggtcgggtgcgtagggtggcaggtcggtcatgagctgggaggtagggcgaaagggttatcagccgtcggatcgagtcaaggaggaggctggtccgacgcacctcgagggccgtcatcgcgaaggcaaagatgtcggttgcctccgtcttggggccaccctgcagcagcagcggcgcgctccagcggacggctcccatgaaggtttcgccggccggctccagcgagaggacgtctgcaaaacgacgaagcgtcagtcgaggggcgagcacgagtcggcgtgagaaagagacaaaccctcggtcacgacgcagttgccaaagtcggataaaaaagcggtcgctgagccatcgatgagaatgttgtcctattagtgtagacgcacgcgtgtcagaaagtggcagcctgcgctgtctacagcgaagacagagcttactcctttaaggtcgccatggacgacgcctgcctggtgaaggtacgagaccgccgacgagacctcctcgatctgtaaaggaggcgagggaggtcagcaacgagcttcgacgagtcggtcgagcagcgagcgaggcgacgcacgattttgatgcgactcgcgtcagggaccgacttgaggtacgagcaggccgtgccgttatccatcctgcgaccgagggtcacgttgtcagcctcaggtgtcaatcaagatcagcggaccaaggatcgcaccacgggatgacaaggaacggccggggctgctcctcgtgccggtcgtcgccgccgtcatcctgccagccgacgtagttgaagccccagagcgggagaatgtgccggtggttgagctggcgcatgacgccgacctccttccggagcgccttgagctcggccgccgcgaacgggacacggagcttcttgacggcgaccttggatccgccaagccaggtcccgcgccacacgagcgaggtcccgccttgggcgagcgggatcttggactggccgacgagctcggccggcgtcacctcgagagggaatgtcatctgcgtctcctgctgcaggaggccgaggtggtgctggaggatcgtgaggacgtgcgtctgaatgtaagggtcgcggcagatctggaagggcaaagcgcgagcatgcgtaagcttctagtgttgatgagtcaggccgagagcgagacgcacgagctgcgccctccggaagaacttgcggagatcggccgactcgagtcgacggacggcggccatgtcctccttgctcgcaaagacgtcgctcaggatggccgagtagtcgagcttcggatgcgtctgctgctgctcgaatcgaatgggccagagcaaggcgtcaggacgtcgggttcagaggcaagagaaggacgcagcggcgagacgaacccgcagcaggaggtcgagcttctccttggtcgagacctcaatgttggcgagcgagtcggcgaggcgatcgatgctggcggtatcgctgacgggcgagtaaggggcgtgagaagaagccggtcctcggttgaccgagtaggcaggagcggcggcggtcatgtcgaggggctaggagagggagcttgggccaggctgggagcaaagaaccgggcgatgtgaagcgggcgagagggcgaggaaggatgaatctggtcaacaagaagggggaaatagggaaggtcaggtactctgggtccttgaggcggatagccagcctgtcatggaggtcggcgcaagggccaagcaagacgtgagcgactggccgagggcaggagcaaagcccgcggatgaaagggggccaaagctgcagtcgcatgacggccgaggtcaatccacgccggattcgtgcgctttgttggcgacacgacgacgagcgacaagacgacgagcgaggggaaggcaatgaaggggagacggcccgaagaggcgcccgagcgctcggctgaaggcaagcaagccaccggcgaatggcggagcttcgcctctgccggtcgacgccttgacactgtttatagctttgagtaccggatcaagcgcaggagcagggcctgccgagctgagctgctgctgctcctcgatgggctgaaaacgacaggcagctcgaaacgcgagcctttttgctgctcctgctcgtcttgctgctgcgcacgcgcgccgcctctccgcgtcgacagatgggacggcagcgcgaccttgaagccagcgacgtcgaccttggtccgaccgaggatgctgctgacggtctctctgaatgagcagctgctgacattgctcatctgtcacaggcgcatcgacggagttacgccgctcgttcccgagagcgggccccgcagacgttcttgggccttctatgcctgcggccgtcttccgcttgcgtcgtcgctcgtacgagcggtcgtcctgaaggaatcggctcttgccgcttgcttcaaaagagggagaaggcaagccgaagctgatctgccttcaagcctgcttcacgaccatgtcgatctggacctccccggccgccgagctcggcaacctgaccgcccgatgcagttcccttcaagccgaccgaagcgcggccggcctactcggctaccggcagaatctcgtcggcctgagccaagctgagctcatctgggcggccttctatgcctgggtcggtgacccgatcctcgctacggcgctcctcatctttgtctggcacgaggtgcgcacgattcgcagacagttctgctcgaaggatgtcgacgggacgctgacacgctgggtgtcattgatgccagatcgtctactttggccgctcgctgccgtacgtcactatcgatacgctcggcctcttcaagcgatacaagctgcagccggtaagccgttgcgcgctctttgccctccgtatgccgttgctcaccacgtcctgcgctccttgcagggtaaggtcgcgacgccggccgagcagtggcgcgtcgcaaagcatatgttgctctgccactttacgatggaggtctgtccgactcgttctctcgagcagcgggccgtcagggctgacctcattctgtcgcctcgcagctcccgctcgtacgtcggcctagacgagcgttgtacgcccttgatcgtgctactgctgacaggactcttcagatcgccggcttccacccagtcgcgactttcctcggcatggccacctaccacgtgccttttccctcctggtcagtgattatcggccaggtcgccctcttctttgtcgtcgaagacaccgttcactactggtcgcatcgctggctgcacacgcctcggctgtacaagtgcgtccctcctgcacaaggtcaacattggatacgttgccaaacacccgaccttcccctctcgccgctgcagatggatccataaggtgcaccacgagttcccggctccgtttggcttgacggccgagtacgcccacccgctcgaggtccttctacttggctcagggacgatcggaggcccgctcatcttctgcgccctcacgcacaatctccacctgctgacgatgctaatctggatcacgctgagggtcagtgccgccttctctgttcgaagacgtcgccctcgtactgactcttccacttgcctcactagctctgccaggcggtctcggcgcacggcggctatgactttccgttctcgctccggcactggcttcccttctgggccggcgccgagcaccacgactaccaccacatggtacacttcccacgttgtcgcccctgtgctctcgcttgaccgagccctgacccctctgcctctgcccgcccggcaggccttcgttaacaacttttcgagctcgttccgctggtgggaccacctgctggggaccgacagccgctaccgggcctaccgctcccggattgacgccgcaaaggacgccgacctgcgcaagaaggtccagagggtcgaggatgcgaaggcggaggctgaaggggtgcggcttgcgaaggagacgatcgcaagggcgaggtagacgttgcgtacgagggatgaaatgactcgtcttcccatctatctgggtttggtcagggcatgagaggggtcgtgaaacggcgcgtgcctcagaagccggccttggcgaggttgtcggcgacgtcgaggtctggagcggtcaacaaggggggttagcaaacggcccaatcttttgccgcgagacgcagaggacgtacagaagctcgccggcttgaacgagatgggcttgccgacccactcggagatggtgtaccggacggggttgacccagccgacgagatcgctgtgggagaaaaaggtggtcagatcgaccgagccgcgagtcgcagtcggaaaccagacgcacaggtggttgacgttgtcgagcgtccctttgtactcgccccagctggccgagctgaccgagacgaggccgtcgtttgggccttccttggcgagaatgaccgagtgcgaccacctgagggaggaacgatgtcgtcagtctcggcctgcaatcgtggcgagcgcaatgagctcacttgaacgtgttgaagtaggacgggtcaaatttggcgccccacgagtagtacttgacgtcggggtcgtcctggacgtcgaggttgaagaccctcatcgcccgagtcgagagggcgtcgaacgcctgaccgtcgccctggtttggcagccggatgacgtcgagcatcgaaagaaccgaaggcatgttggtctctggcggaagcggagcgagggcggagcgaggggggagcgagggggatcacggtcagcaacgagggtcttcctcctttacgagaggagagagcgccagacgcacggccgatgatgtcgtcaatcaggtggtccgcaaacgccgacccgcgatgaggcgtcgcgattgtcgtcaggctcgcgaccgtaaagttgtacggcttgagcttcgagatgaggtagcggcagtcgaggccgcccatactgtggccgacgaggttaacggtccggccgggaaagtgctcctcgatgtgggccaagagcgtccgggcgcgctcctcgatcgacgacgttgccggcacacgggcgataaagacctcggtcttgttgccctcgagaacctccttgatgccacgccagtgcgagatctggagcgaagggagcgacgctgggccgaggtggtcgaagccgaagaggccgtgacagaagatgattggatgctgtggggcgaggtgccgccgagcaatgacatcctcttcgtcctcgaccgtgtcgcccttgtcctcgtccttgagcatgccgtcgaccatagccttgtgctcgcgccaccagcccgagccgctgctgatcggccgaacctgctgctgctgctggcccaagccagagtgccgacgctggacgtgccggagcgagtcgatcgagctgagcgtcgccgaccgctggaggtaaggctcgccgaagcccgtcggcgaatggctgcgcgagccgggcgggttgaagaaggacgaggtggcctttgcggtcgcgttgcggtgcgtcagggacgcctggcgggcgtgcgatacttttggcgcaggtcgcgtcttgagtggtcccggaggaggcgaggaggaccgtggcgactcgaggtgcgccatcggtggctgcgcgagcgggttgggagggatgaaggtcgcgccggtcgatgccgaggcgtatagcgaagggagggcgagcggaacgtcgggcgacgagtgggtccggaacggctggacaggaggcgtcgtcccgtcgttcggctcgctcgcagcgagcgttcctatcggctcatcgagcgcctcgagcagcttgtccgctagcggacgctcgtctgcgctctgggccgacctcggcgaaggccgcgcaaagaccggaaatgaggagatgagtgacggcggctggggtgtaggatagacgggttcaacctctgggagtacggcggcggtcggcgaaagcgtgcggaggagcgggtccggcgcgtcgtcaaacgagggtcggccggatgagacgacctccatcatgctgtcgacgaggcgctccttaccctttaccgacaactccttgatcgcttctgccgacgagctgctgccaccaccgagccaggccgggagggcgccgaggtccaagctcgaccggagtccttcgagcgcgttgacaaccgagcgctgcgctgcgcctggccggtcttcgccaggggccgactcgggccgagcaggaggacccgcaggagagactgatgaacttgcagctctcggcgggctgctggcgttagcccggagttgggcaccgacgccagcgttgacggccgacgacgtgctccggccgagctcgctcgcggtcgcggccggcggcgggacgacggtaaagatgcgcttcatgaggccttcggcaaaggttagctgggcggctggtggcggtgtaggcggtcggtcgacggcagccgggcgaggcgagtggtcaaactggctgaggtcgatgatgttgctcgaggacgaagcggccgaggaggaggtcgccgatgacgaggcagagacgagagggacaggggcaggtcgggcgggcggcgaggagctcatgcgagcgacatgccggacggggaaagacagcaggacaggtggggctcgaacgtgagtgtgtggctggccgtatgtgaggacgggctgctggagattcttctgggaagctgatggtcggagggagcggaaggtcgagccgcttcgtctcgcgttgtggcctgctgccggccaacgtcgaccttccgccccatctcgcctccgtggtaactcctctactcgctagacaaggagctgctcccttctccctagattctcttcgcccggctcccgatgaacaaccctcgctcgcggacgaacgagtaccgctcggtctacggcgcggccaaggcccgggcgggcccgtcctcggccggcggcggcaaggccaagcagcagcagcagcagcagcaagggaaggccggtagcaagagcgaggtcgccaggctcgcaggcggcatcgcacgcgacatccagtcgacgaccgagaagcttcagaagctcgctcagcgtgcgtcctgctgcggctcgctctgttgacggcagcggaaccggacgccgcgccagctcacccccttgtgctcgtccctcatgctgctctcctcttaacagtcgcaaagcgcaagacgctctttgacgaccggccggtcgagatctcggtatgtgtcgcgcttttaggtcggcctctcgacggccatcggcttggggactgacgaccgaccgacggcggctcgacgcacttgaccttgcccgctcctcctgcccccccccccccgctccaggagctcacttatatcatcaagcaggacatctcggacctcaactcgcagattgcctcgcttcagcagctgaccaaggcctcgtcggatgcggccaacggcgggcgcaagaaagaggcccggcaggtcgaggagcacaactcgaacgtcgtcatgctgctccagagcaagctcgcagagatgggcatcggcttcaaggatgtgctcgagatccggacgcaggtcggtcctcgcgctgtatggctggctggaggaggtaagctgaccctgttgtccttctatcgaccctcatctccgcagaacatgaaagcgtcaaaggaccggacggagcagttcatgtacacgtcgtctggcccggcgtcggcgatggcgagctcgaaccgtgcgtcgtccgcatcctcaccgctcgtcgacactggtgcagccgccggaccgcgactgagacgcgccaacggcccacccgcttcctcctcttcctccacgaacccttacgccgatgcctacctcacccggccagaatcgatcctgaacgccccgccgccgaatcgcggtgggtcgccgtacgcgccgtcgccagctggcggattgaccggcgggcgcaactcgaacgatggagggtactcggtcgaccaaaaaggcaaaggtcggggcgactaccttgcgctcgacctcgaagacgccgagggcggccggggcggcgccgtagggggcggcgcccagggcatgcagatgcagatgatggaggagcaggtgcgtccgaacatcttgactcgactttgacacgtcgctgaccatcgcctcggcctcgccttttgtgcaggacaactacatccagtcgcgctcgaccgcgatcgagacgatcgagtcgacgattgccgagctcgggaccatcttttcgcagctcgcccacatggtcgccgagcagcgcgagacggtccagcgcatcgacgccgacacgaccgacatccagaagtacgtcccgcccgcctgcccgccgcccgagccctccgccctctgctgaccgcgcaaattcgcctgcctctcagcaacgtccagggcgcccagcgcgagctcctcaagtattatgcgagcgtttcgtccaaccggtggctcatgctcaagatctttggcgtcctcatcgttttcttcctgctctttatcttggtcacttagatctctgcatgcaccttccttcacaaatgctcactcgtcaggagacggcacgcgaggcgtaagccactcgtcaaggtcaagggcagcttggcgctgacggctcttgaaccgaggctgaaccgaggcaagctcggtcgtgctctgcgtgcccgttcttctgcgataggataagtcattgtaaggccaggcttatgaagggatctagtgagagtttgagagacgaggaccgccagatcacctcttgacctgggcatcttcgacgtgctggacctgggcgttgcgtttcttggccgggttgtactcgttgttgatgtgccgctcggctgcaagcgtctgtgcaaagtgcgagcggtcgcggaagtaagtgctgcacgacgagcgaagggaaagaactgtcagtgagcgtcgctccgctcgggcagcgatggaacggaggagaacccacccgtgctggacaaaggcgtagacggggatgatgagagggagcgccaggatggcgagaataagtgacggccagacaagctctgtcggtcggggcacgggtttcgtaagtgctggccgagcctccagacgaccgacgacgcgaacagaggcggactcacggaagttggtgccggtgccgatgttgtggtagaagggcgtcgcgtacatggcggcggcgccggcaaggacgtctcgcgccatgccctggaacatgggtcagctgctctgtcgacaagaagggggaaattgggtcgactcacgttccctccacaggcggacgcagcgtaagggccgtaagcggcgaccatgtagtctgatggtgagccaaggctcatcagctgccgaacgaaaaggccagcaaaacctgcaccggctcactcaccaatcgtggtcagatagatggagaagtttgcgacaccgaaaatactcatgaagatcatcggcgcttgatagacagaagggggagggagagtcaggttgtgaggcgactgctagcgacgactggagcacgcaccaatccagtgtacgttgtaggctgggccgagggacgtgaaggcgaagcccagaaggccaacaggaagcaggatcacggtgtactggaggatccgcatgcggtcctcggggggccgggaagggtcagccttgcgaagtcggacctgccgcttgatgtcgatgctgcagagggtcgagagactggttcagtcctgaccacagaaacgcaaggtcgccagacgagggaaagacaaacaggtggatgcagtaggagatgaggtaggcgacggcgagcgcgacgaaggagaggccggtcgtctggacgctgaagttccatttcgcgaacagagggccggtcgagtcgagctgcgagatcaggacagaggcggagtagcaagacgtgtcagcggcaaagggcgaccgtaggctgaaggggtagggggacgaacgaggatgaagacgagtgcgtctgcgtagcccgacagcagcgagaggcagaggacgatgggctcccggtagaacatgacgaacgggcgagtcatgatcgccaggacctccttggtgtcgaaccgatgctctttgagctcgttcgggccgtagacgtttgggtcctcgcccgtcttgcgccggcgcttggcctctcggtcgagcagcacggtagccctagtctctgggacgcagaagaagtgcagtgcttggacaaagccgccgaagatgagctggatccagaactgtaagggggaaaaggaggagtcagttcttggttcggatgctcctacttcaattgacggttggcgcaacgcacgacccatcgccagtgaaggaaggcctgaacaaagcctcctacgatcgggccgatgacactgcctccgactgatgagaggacgacaaagcagacggcatactgctgctcgtcgggctcccacatgtcggcgaccatgccaagcgtgaccgagccgcctgcgctcgagagaccgccgaggaatcggccgacgacgatcgagccgaagttcggggcgagcgcacacggcagctgccagactgggaggtcacggtaggtcagcggcgagcgctgacggcgaagagtaggcgcagagggacgaactgttgaccaggaaaagcgaggcttgcagaatcggccagcggccaagctcctcactcggagcggcccatagctcgcagccaaatccgtaggcgatgaggaagatggcctgtggcagagcgaggtcgtcagctgccgctcaagtatcagaagcctgtcgtcactgccgagacggacctgtccgacgcgggcagcctgctcagagataccaaagtgctcagacatgccgccgactccgttgctaaagggataggcaggacggacgaggtaagccacataacgagcacgaaaggcattggagaggcacccacgcgtaaagagaggtgttcatgttcatgctgcactgttggaagataagaagagacaggtcagcaacggcagctgcctgcgcggggagtcgatgcagacaaacctggaccaggaagatcacgctaaggatcgaccatctgcggtaggtacagaggtcagctctgggagagcgtaacaatccagccgacagtgcgtactttctcgtcgtcgagtagcagaatccgagcttctcatatgccgcctgctcggtcagctcgaccttgccatccggcctcggcttgtcgacggtaaccgcacgaccgcggccgccctcggcgagcgtctcgtcacccgtctgctcggagccagtcggcgacggagctcggcgcggcttctcgatcatggccgaggagagggaaaggggaagggtgagaaggacggccaaagaggtggcggctgaaggacgagcggaaaaaggggaggggatggcaggaaaaaggacaacgaggaaggaggtggcggttgatagacaggcaagtcagccctctcggctcgtcagttcagcctctgacatgcggtcagtacttgacggctcacgcataccagttccgccggtgctgcaagcggagcccgtcggcgagagtggagagccgcagctgaaacgaggggccgcctggtgacgcgccgcgaagccccaccgccgcacctgccgacgtcgagccgaccccacaaggtccgcagacaaggcgcagaccgaaggagccggcaggggccagccaggtcaaccgccggggacctcttccgctggggtccgcacgagcgaggccagtagtagggtggttgcgattcgggcgtctcgggcgattagaggagccggcgattctggcatgacgaccacgccgcctccaggtcgaccaggtgcagcagtcagtgcagacgcactgctgggtcaagacaggagctcgaccctcacgaaagcatggctgctaccggggctgaagagctcggagacagctcgagggctggccgccatcggctcggatctgagcgccgctgcaggggaggagggttgctgtgatggtcgttggtcctggcgacgacgggcgtcggcggtgactacgacgagctgctcccctcatccaaagcatctgcagcaggtcaggtcagattcgtcaggcttggtgcgaagagcgagaagtgatcgtgagagttggccggtcgaccttgaggtcagctcgttcggccgcacaacttgccttcgaccacctcctcctctcgcctgactggaacgccgtctcggcactctgaccctccttgggcgtaccgactcttcaagctgataaggagcgccttggctgatgcgctaccagcgttcagctttcccaggctcggctggctgctcgactggcgtcctgacccggcgctgctcctccgcccggcatcggccctgatgagacgacgcccggcgacgccttgacaccttcgcacttcctctccgggcagcaagagcgctcggacgccgcggccaacgcacctgcagcagctcgcaccagttagccgcccatggacgggatgcagctgtcgcccctttgatcggtgcagtcgtcgagccccttgcctgccggccgccacgcgacaacgccctcggccgccggtgccctttcatcaaaggccctttcagctcgcactcgagctcgtcaagccagcttcgcggctgcctttgacggggctgggctctgggagcgcgatgggcgagatggcgcaccagctcgccactccttcctgccagtcgaccgccagcttcttccgccgactctctcccctccccctcctcctcctcctcgtcctcctttccggccatgttcgaacaagtgacaggcctcgtcatgatagcctgtgagtacggtcgctgtctccttctagcgctcgagactaacgccttcctcaccgcgcctggcgacggcagcttggctgagtgagtagtctgcctctgcaccgtcttcgacccccctcagctgcccggctgacctcctttatcttgtggccagatgcaccgctctttgccgtcgagacctttggcacgctcacctactttcgccggttcggggcgaccgactcgcgtctctaccgctggtcgattgtgatggccgtcaccgttgacgccggtgcgaacccgccctagacctgcgccactctgcggagagtgtgctgaccttgcgcattctcctgccagccaccgtcgtcaccgtctgcgcggcttcatactcgtacacgatcgtgcgtttgtcgagagacccgcttgtcagctgagcgcggtggttgacctctccttcccacctgccggatctctcgcagacaaactggggcgacgcaacgtacgctatcacccagccctggtttatatctacttatattgtcctttgcggcatctcggccatgatatgccagggtctactgtcgctccgggtgcatctctccgcgtctctctttgtctccttgcctcgttcggcgggggatcctcgctgacgatcagacgcaaactccctctttcagatctaccggctgtcaaaggcctggtggtaccttcctctgctacttgctcccgccctgctcagcctcggcggcgcctgtgctaccgctgcgatggcggcgacgctcgacctctcaggccgcgagtcactgacgaaggtcgtcatcctttggctcgcggccaaagcggcggccgacatcgcgatcgccgttgcccagatctggaacctccagaaggtcaaagctcagtttgccgactcgcgccacattgtccgccgcctgtcgtggaaggcgctcgagaccggctccctcaccgccatgcttgcgattgccgccatcattgcctactccttcgcgccggaaactaactgggcggtcctcgtcgggatgattctcggcagggtgtacacagtgacgctgctggccaacctgaatcagcgcaactacgccggcaaggaggatgaggacgacaccttggccaagtctcggaccggcggcagcggtggtcggcgcgtcggctttgcttcggaagtccggcacaccggcgacaagtctggcgagattggcgtcaagagtgccgctcgcttcgacgctgccgacgaggaggacgactttgacgcggttgatgtgcgttcgagctgcctttcgtgcaacccctccgtctgacaaacaaccctcttgcgctttcgcagggcacgatcgtctaccgcacgcacacctctggccgcaccaagcgctcggccgacctcgacgccgacggtcgcagctggcagcagcacacgcccggaagcgaagtcgagctcggcaaggccccactcaagcacaactgagggcctttctttgaccctgtcctgcctctctcgccctcctcgaccccttggtcccacactcgttcacttctcccttggtctcccttctggacgcacctctccgcggtccacctgtttgtctctcctggtttctatgcgcgtcctctttccgaaggcagccgcagaatggggtcgtaaaaggtcatgaagaggcgtagaggggtgagggcagcttgcagggtgagtagcagaacacggaatagagtcatagcgggcctcagtcgtcaagctcttcgacgtcgtcttccgggccgagagcggcctgctcgcgctccttgcgccgctggtcggccgcgatccgctttgcgagcgccgcgtcgggctggggcgaggggaagaagagcaatcagcaggcggtatgagtgcttgaggtgaggatgcggcggcagaccttgatagagagggccgagatgatgctgtcgcagccggcgaccgggcactgcttggccgcgccctcgaggtattgaatgattgtctcgtgcgagaacgagtgcggacagaccgtgctgcaagagccgggagaaagacagaagtcagtcgaactgcctctttgtcggaaggcaggaaagagagacggacgaggtatacgggtcgacgagagttgtcagcgttattggatccttgtaggtctggacggcgccgccgagctggatctcgtcgtccgagtcgtcgtcgtcctcttcgccttcgaccagaagtagagatcaggaagtcggcacgtcagaagtgggtcggcgaggtgcagcgagcgggaccgcgcgaacgcaccacgcggaaagaagtcgacgacgggcggcattgccatgtcgctcccgtgctgcgattcccagaaggcctcgcgaaagttgatgtagatgtcgcttttcgagactggaacagatgagggccagaggtgagcagtctggttgacgggcgttgcgaggcgtgcgcgctcacagcgttgcctcggcgtcttctttatgtacttctcctcgcggcgtctgcagtcggtccggaagcggccctgaatgtcgtactggagagaggaacgcatgcgtcagcagccgtccgccagaagtcgaggagcgcaagccgtcggcgtaacgcacaatctcgcccgtgccgtcgagcgtctggcggatctcgcccagcgccgccttgcgcagcttgacaatctcggcctcgtcgacgagcttctggaactggaggtcgatctcggcaaagtagccgccctggccatcgcaagcatcgcagggtcagcgatgaagattacgcgcccgggaggagcggaagagcacagccgagccgcacctcgtcctccttgatgccggcctccgagagcgagacggccgtgtcttgcaattcttcaagcgtgaactggatcatcgttagcagtggcttgtactcgtcatcaaggagcttgagctgtgtgcaaacgagcgagtcgagggtcagcggcgttcgagtaaggcggtccttccgggcagacacgcgcacctgctgcgacgccgactgggcatcgaccggtcggtcctgccatgtttccagcgtaaggccacgctcagctgccgtcaaaatcgactctccctcctcgccgtcgtcctcggcttgctgcggctgctgccgctcctgctcttgtcggcggccgtttgagcgcgagcgaccgttggagggcggcggcgcaggcggcgcgtcctcgaccatgacagcctcatcatcgtctgactcgcgctgcttcttgaccttgacgaaaggcatagcggagcgtcgctcgcgcaaggagaaggagtcgcttctgagatgagaggctcgggggcaagaggacagcgcggttggcgacgatggacgcgaaggcaagccgtcgggtcaggccgccggtcgagcaccggcagcgcgcgcgcgcgcgggagcggccagcggagtttcaattcataaattcgggctggccctgcgacttcgaacctccagccctgtcgtcgcggttgcgcaggcctcccacacactcactctccttcctttaccccttccccctcaccccaaggagcagcatggcacccgtcgcctccagctcgacgagcgccggaccgtcgtcgcggaagcgcaaaacgcctgcggccgatgtcgcgccaacggccagctcgagccgcagccagccgctcgagaccctgacgggctcgctcgagcttggcgccgactcggacgaggaagacctggacggcgatgttgcgctcgagggcgccgccgcggaggacgatgacgacgaggaggagttcccggagctcgacattggcagctcggacgaagacgaggaggagagcgcgccggcgccgtcggcaccccggtcgcggcgagcccgcaggaaggcgccgtcgccagtgccggctccccggcgtggcgacgaggccgacgatgaggaggacgatcggctcgaggaggacgacggcgccatcttcaccgaagaggactctggctcgcagtcgggctataactcatccgacattgacgacgacgaggcggctggcggctcgccgttcggctcgccctcgacggcggcgacctcgctcgccggtcggtcggtgcggagtgcgtcacctgtcacgcgcttcctcgctgagcacacggtcaagccggacgagcgcgaccacgccctaccggacaagcagatcgacccgcaggcgggcgtcatgacgatctcggacctgacgggccggccaaagcgcgtgtaccgcgacatcgaggccggctacgggagtgagagctcaaccgaggacgtcagtaccgatggcagcttggaatcgcacgtgcgcttcgaatgctgaccgctccctgaccttggaccctcgtagtcgcccaaccgcgtcggcgacatccccgaccactggtacgacgacctgccacacatcggctacgacatcaacggcaagaaggtcatgcggccggctcagggcgacgagcttgaccgcttcctgtcgaccgttgaggacccggactcctggtgcgtgctcttctgcaggctacgcgaaacgtcggctgacgccctctcccctctgcaacgtctcacctcaggacctccgtccaggacaagctgctccagaaggacgtcaacctgacggacgccgagctcgacatcatccggcggcttcagaagggcgagaacccggacgagaactacgacccgtaccagccgacggtccacttcttcacccaggacgtcgaggtcatgccaatctcggcccggccggcacccaaaagccgctttgtcgcctccaagtgggagcacaagaaggtgcgctatgcaatcagctctcgtgggtctgttccaagtctctgacgacgccaacctgtaccccttgctcgcccacagatcatgaagatcgtccgagccatccgccagggccggatcgtgccccagaagccgtcgtcgaacaagccgaccttctacgcgctctggtcggcggccgactcggctccggccgagcatgcgatgcacatgccggcgcctcagcagcggctgccgaccgacgccgagtcgtacaacccgccggccgagtatctactcgatgccgaggaggagcaggcttgggacgagaccgagaagggcgaccggaagcgcgagttcaagccggcaaagtacgagtcgctccgcaaggtcccggcctaccacgagtttgtccaggagcgctttgagcgctgcctcgacctctacctcgccccgcgcatgcgcaagacgcggctcaacatcgaccccgagtcgcttatccccaagctgccctcgccaaaggagctccggccgttcccgacgtcgaccgcgatccgctactcgcacccaggcggtccccgtgtgcggtgcatcagtgtcgacccgaccggcaactgggtcgcgaccggcgccgaggatggcactgtccgggtctgggagctccagaacggtcggctcgcctggcggtgcgaggtcggcaagggtgccgtcagcgccgtcgagtggtgcccggaccgggcggtcggcatcattggcgtcgccgtcgagaaccgggtcgccatcctctgtccgacgccgatccttccggtcgagctcgcgtaccactctgcgcaggtcgcgctcaaggccgtcaccggcgcatcgacggcggccgccccgcgcggcgacgacgtcagctggcttcgcgggaccgacagcgagcgcaagcggggcatccttgttctcatcgacgtccctggcacgcccaaacaggttacgtggcacaagaagggcgactactttgcgaccgtcgcggccgacggtgcgtcctgactcgcgtggccgctatgcgcccgtgcgcccgagctgaccatctttctctcgcctcgcagcctccaacaagtcggtcctgatccaccagctgtcaaagcaccagacgcagtcgccgttcaagaagaccaagggctcggtccagaaggtggccttccacccgtcgaaaccccacttctttgtcgtcacccagcgctacatccggctgtacgacctcgtcgcccagacgctcatcaagacgctccagccgggacttaagtggctctcgtcggtcgacatccacccgctcggtgacaacctcatcgtcggctcgtacgacaagaagctctgctggttcgacctcgaccttagcaccaagccctacaagacgctccggtgcgttgccccttctgggttttctgactgatttctgcacggcctcgactgacggccctttttccgctttgcagctaccaggcccgcgccatccgctccgtgcactaccacccttcctacccgctgttcgcgtcgtgctcggacgacggcacgatcaacgtcttccacggcaccgtctactcggacctcatgcagaacccgctcatcgtcccgctcaaggtcctccggggccacgccgtccggagcgggctcggcgtgctcgacgtccgctggcacccgacgctgccctggctcgtcagtgccggcagcgacggcgaggcccggctgtggtgcccttagagtgcgccctgcccccttgcgcgtccccacacgatctttgatgcgctttgacgaccaggtgcgccggaaaggggtggggaaggagggtcgttgcagaggaggattgcggcagacagcaggcggcgagtcgagtaagtgagccgaggcatacaggttggcgacgattaggtaaaggaagtgagagagaggagagaataagtgggcgagagacggacgacgtcgtcgcaaagagactagttatgcgagagtggaggtcggccgagctcaatctcgctctgccctggcgtgcggccggcccagacggtgtccgattcgttcctctgcagaccgcactggaaatctcagcattgagcagcgctgtaggcagagcagcggccgtctcacctcggacttgtctgcagagaggcgcttcgagcggtatatgatggcggcaggctgtcaagagagaaggaggacgtgcggtcagcgtctgcgaccgagatcgaacaagtgggagaccgcacctgcgccggttcgtagacagtcgcctcgtcaaagtggacgttcgtcagcgtctggacgttgacgccgccccggctgccgccggcatggctcttgccgccgaattggtccgagccgctctgcatgtggactcggccgcctgaagggttcgagaggccgttggtgctctgcgcgtgtgcgcgtcgatttaggttgacgaggagggtgatgctgcgaataggcgagcatcgagaggttagcccgatgacaagcgcgatggcgatagaggagcgaggacgagcccatagacacggcccatcaccatgcctagcatcggcgagagctgtgcgtcattgtttgggcggcgcgagtcagcctctgagacctagaaagaggcaagggagggaatatgtacattggtttccgactccagagaatatacaattaaagcaatggacgcatagacggccgtcaccgatcccgtctcgatggcctggagcgacagccggcggatgatgctgcgggagcagtcgagggatgttcagcgcaaagctcactcaggctcggagggacgagtgaccaacctccgtgactcctcaaactcggcctgcaccttgcgcagcgtccagacctggcagatggcaatgaggacctgcgaggcatgaggtgagggtcagcctggtcgtcttcgactcgaacctcgaagagactgacgtcggcggcaagcttgcccgagagccaaagcgtctgcaaagtcggccgagctggtcagagggtgctcagcagcaggattgagcgaccggcgactcacgacccatttcgtgacgagcggccggtcagcaagtccagcgccgacgacgatgtacgaggacatgatggcgccaatgagcgaggcgaccgacggaagggcgaggaacggcatgtagagccagttggacgtaaatttgtagacgcggtaggagctgagcggtcgagaggaaagctaatgtcagctgccgagtcgggccagtggagaggatgaggccgcacaggaaggtttggcagatgatggcggtcaaggccgtgctcgagacatagaaactaattggccatggctgactggcggcatacgcggcatcgccaaagtgtttctgaggccggggcacatagtcagctagagtcaggtcgaggcgggtcgaacggaagggcgactgacgatcgagtactggagaaagggaaggacggctcagcttcagccgcgaaaggggcaaccaagcgcatcgactgaccatccaggcggcggccatgaccgacatgatcgtcccgcactcgatcacgagcgtcgtcatgacagcgagcttgtacggaaggaagtcgcgcgggaagcggctgtcaaggggaggtcgcgtcgcggttagggggctttgccgtcgcgcaaggaaagctgagagaggcgcaccggaagtactgcaggagagggaaaaggtcagcgactggcgacgtggtagcacctgtcgctgcgacttacgacgagtgcgagcgagagctcgacggcgaacaagggcgggttgacccaggctgagacgttcgagcaagccggttagcattttgctttggcctggcaatgaggaagaggacaaacaggcggcgataatcggcccggtagcggtggcgatcgacattgctgcggctctgctagttgccagtggtagaggaaggggaggaagaagggccgtctggccgagagctgagagagagacaagagcaaggagagtcgaggcggaagctggaggacagtgaaggcgagcgcgcaaagtcagcgctgaatggtaacgctcgtcaggcctctgcgtaccgatcggagcaggagaggaacaaaggaggacggcgaaggaaaaagaagagagagagtcgtgggaggagaggaaggaggaaggtcgcagacgaccgctgaccgctctcttttggcccgacccgataggagcagcctcgtcggccgcagtgcgccgaggtgaagcactcctttagtttgagctgcacggcaagaggaggttgcttgattccgaggactgcctcttcttcgggctgagtaagagggcgcttggcggccgacgtcggccgggtgaagcggtgggagagagggggtccgtcggcggttttctagcgtcggtcccagccagtcgttccttccattgcgaacccagtcagcactcctcgtcagtcagacaaagggaaatagccagtcagccctcgagaccaaaacccactcgtcagagagaggagagatcgacaggtacgcccgacccatcgccgttggcggaaagccaaccgcccttctgcccctttttccgcccccccccccactcgactcccgctgcacttcgaccctcttcgtcgacaggtgtaggatgaacgcacctccgttctctgcagtttcgttgaaactgataatccaatgcgaaaaagttcctggcggagtggcgcgagaagggtgccgtcagcgaggagacaaagcgcgggctcacgctcaaggcctttgagcagacggccgactgtgatgcggccgttgccacgctcggcggtgagaccaagagcagcgccggcgtccagcggatgcgactcaccagtaaactctgttaaagacagaagagattgtcagcttggttggtgtcaggcagacctttggaacaactgacccatgaaggcgaggacgaagaggaagaagagggcgccgcgctcggtgaccgagtcggtcggaacggcgttctttgggaggttcacgggatagtacatgcagaagtagatgatgacagctagaagaagagccaagaggtcagcgaggccccgacgcggactcaggcacgagtcgactcacccatgagcgcgttccaggggatttcgacgataatgttcgagaccatgaagatgagccacgagtaggtccgcgaaggccgctcgcggacctcataggcgtcacgctgcttgacgaagttgggcatgatctgctggacactgaggagcagggaggggggcgacgagtcagcgagcaggccggacgagcgccagaacgaccgaccgaggacgcacagctggccaaagactgagcgagggtccggaagacgagtcagcgagcactctagtgctaagataggaagctcgaggacgaaccagtgaagagcatgaacaccgcgaagagctggttttggaggccctgctgcgacgtgtcggcatcgaaaaagctgaagccgataaagagcgggacgagcgtgcagaggacgatcttcgagtagatgtaggtcgggctacgccagtactgctggaagaccctgcggacgagaaaggaggtcggccggtcgaaggtcagcgggcgtgccggtaggaacgacgcagcgcgcaagacgtaccgcttctggacctccttgaactggacccagagcggggcggcaaactccttgtaggcccacttgtcgtcctggccctgcgagccagtactcttggggttttgctcgagacgggcgagctcctgcttgacagcctcgcgctcaggcgaggctttccacgtctcgtgccagtcaatgtcggtgtgcgagcctggagcggcgccgatgacttcgagcatgtactcggcggggttgacgccgtgcgggaattcctgcaagcgaagagagaatcgaggagagtcaggtggcggtcgccgtttgtggagatgaagcgcaacgcacagacgatccgtttctctcaaagtaggcgcgcaggtgcttagactcctcgccaacctcgccgaagtagattgtcttgccgccagcagccaggaagagcagccggtctgcgacgaggaaggcgaacgcgccgcgtcagttccgagagctggcccgtctcgatcagaagcccaagagcaccggcctcgcagggacaggacaacaagtcgagagccgatcaaggggacataccgaagcgagagaagagcatggcggagggctggtgaactgtgggccgagaggattggaagagtcaatcgaaggcagggatggaaaatcagcagcgcgacgcactcgtgcagagaactgggcagatggttgcaggcagctgtgtcagcgagcgagactgcagcaagcaagaggacgatgagaggggcgacgtactagcctggccgtggttcttgagcgtgtcgaggaggtcgaggatggcccaggaggtttgcgagtcgagaccactgtttcgttgcaggtggaggaagggaaggtcagtctgccgatcttcctttcataatggcttcaagctagccagctggactgacctcgagggctcgtcgaggaagaggaggagctcaggcttggccaccatctcgacacctgatacgcaggagcaggcgtcagggtcaaagagctcggtagcgccttgtggaacaaaaagggaccgaccaatcgacagccgcttgcgctcctcgacgttgaggccctcgccggcaacgccgacgactgcgtccgcgtacttgtccatgccgagcagcacgagaatttcctcggcataggcaagcttctcctcccgagggacgtgctttggctggcgcaggatggccgagaactggagtgcctcgcgaacggtggctgtctccaggtggaggtcctgctgctggacgtagccggtcttgcgctgcagatagccaggttctcgggtcagaacgacattgcgagagacaagcgagcagcatgcgccgcacctggaagctgtcgtcacgagggttaccgtcgacgagtattttaccatcgatcactcccatcgtgacgcgcgaggcaaggacgtcgaggagggttgtcttgccagcgccagagacgcccatgagcgcggtcagggttccgggcttgacccagccatcgacatggtcgagcaggcggcgggtgccacccttgacctaggaggcgcaaaattcgcgaagccaggtcagctccttgcttcagggcgagctcggccaataagggcacgcacggggacgtcgtaacagagatcctcgaagtggaagacggccgtctgcttctgaatgttgacctcgcggtcagagttggactgatccttcggccgccggtcgaccttgccaccctcgacatcgtcgccgtgcttctcgtcctgctttagcgccttggggatgcgtgtccgaggatagaccttgatctcgcccttactcttggagccagagatgagctccgaagagccaaggtagagagccatgaggccaatcatgaaagctagttggggagatcgaggcacacgctagtcagcagatgattgacgcgaggaagagaggcagggcaggcgaaccgatcaggatcccgaagttacgccctgtgcggtcgcgaggagggtcagcctaaagtgcgacaaagacacaagcggggagagagagcggggcgaacacttgtctgagggattgcgaacggctgatcagtcttggtgcgacgcagagagcgagcaagagaatggcaggggacatacgagcgtgctggtactggtaggcaatgtcgaggtagcggtcgccgttgacaaagtcctctgcaaggcgtcgatgatcaagggtcggtcagtccaaaggcgacaagtctggaccagcgaaagttgaaaaggagacacacggcccgcgacggcgcccgtgacactgcagatcgtgttgagcgtgcccgcaccggggtaggtcggaccagtactgcagcgcccgatagtccgtcagcttagcggctgcgagaacgtgtgcgaaggaagcaggcatacgggacggtggtagcgcaagcaaagtcacggccgtggaactcgttgatcatcagcgactcgaagccgaacctagaacgtcaaccgctcgccgtcagcatgcaaggtcaggcgtgtcgacatcgggcgaaggcacgtactggattgggttgaggtagctgttggtgaggcgagaagaggagcgtcagcgtaagcggcagagtcggcacccgccgaggcgtagacgcaccggacccagccgatccagccaagcatataggggatcgggagcgcaaactgcaaagaaagcagattgtcaaaaccgaggcgaccttgcgagggtagagatcgggtcctactccggtgtagaggaccatggccaggatcaggagggcggctgtgcaggagatggaggcggtcagtgcaatgcttctcacgcttcatattcgcggccggccgacatacctgggacgagcgcctgcgagagcgatcgcgacagcgaggcaagcgaccggaagaacatgctcatcgtgagcgtcaggaagaaactgtaggagaagggcgggggtcgtcagcgaacccgtctaatttaggcagcagtccgctcggattcacctgatgagcatgaagaagaagaaggcgccgggctcgcgacggaggttcgtcatgaagtagatgctgcgagtcgagtgggagagaggaatcgtcagcgacggccgtcagtcggagtggacggcgagagacctacatcaggttgaaggtgatggcgttgaggatctggtagcggtgggggccgagtcagtcgggacgcctcacgttttgtcggtcgcgacgggcagccgcaccttgtacggcatgtcggtagccatcgatgcaaaagcctcggcgctcggccggtggaaggcgtagcgcgcatgcttgtcgacaatcggccgctgggcgtagagggtgaggatctgagcggggagagaggcatctcagcttcagagcagacggcggacgatccagcctcgacagggccgcacctcgagggccgagccaaaggcgttgaggaggatggcaaagaagagcagggaaccgcggtagtagaacgacgcggtcgtcggctggaggttgtagaactagaagggggagaggaggagtcgttaggctcggcggcagctacaaccttcaggagggaaagagcaggacgcacgaccgagctgacgatcaaggccatggcgctgttgccaaagagctggaagaaactgggcaacgaagtaaccggcgaggcagacgtcagcagcgggcagtcgagcttagggacggcggagggggctcacgtaagcgacggatcggccttgagtctctggaagccgcgccgaaggcagagcttgatctggccgccgtagctgagcgtgtagggacttccgggccggctgaggtgaggcgagagagagagatggcgtcagccactgggttctccgagagagcagccgagcgcgatgcacgaacatgtgtttcgactggacgtggcggcggttggccttgaagtcttcgaggagctcgccgttgacggggtacttgctctcgtactcggccagctcctgcttgagcgccttgtattcgggactcaacttccagcgggtctcaaactcctcgggcgtgtgcgggacctgcttctcaaagccctcgcgcggccgtcgctcgagcgtcgacgttaggccggtgaggaagtcgggcgtcgtctgctgctcggggcagtagaagcccatcgaaacaaagaactcctttgcgctgcgcgagagggaggcgtggcctggtcgtcaggcagggtaaaggctggacgagggctggaacggtactcacgcgtcggcccggccaaagtagatcgagcggccctcatagaggacgatgacctgcgacgggagctttggtcaacaggcataacaaagggaagtcgcaagcgagcgagtcgtcgcaccttgtcaaagcactcgtaggccggctgcggagcctggtagatagcaatggcagcgacgccgtcggtcatgtccaggcccgacttgatcgactggcaaaacgagatagccgttgccgagtcgaggccgcgcgtactggaggccgggtgacaggtcgaacaattgaaagtcagcttccccgacgcaacagggcctggtcgagcggccaatgtccattggacttacctgttgtcccagagggccaggggtgcctgggagaggatgacctcggcgatggagacgcgcttgcgtctgcgagagggaggtacagcgagccgtcagcgtccattcgggagccaagagggttcaggtcagaacgcactgtccgcccgagactccgcgaatgtagtcgttgccaatctgcgaggcgatccgagccagagttcgtgagcgagtgcaggagggcgaatgctctgagcgaatgtcagtcacgcacccggacgtccttcgtgcccgaaatgccgagcacggccatgacgacaccgacaagctgcttggcccactcaagctggctgagaccgccaggcgggttgcgcatctgcaggcgacgaatcgggggcgaactggtcacctccgagtctaataattcgtctgcccatcaaaagacgtaccgcccgggcttgagctgcaaactcgagggtctggctgacagttagcagcgggaagtgttgctcggtctcggccgagctagagaacagttgtgaggaagggagttagtctccctttggaacaaccgacacagaccggagagctcgacgcactagacggcctcgccggcaaagttcttgtgcatctgctttggcgtcacaccacggtactgtgagaagcggcaggcagggtcagacgctgcaaaattacgtggcgccaaggagcagactgacgttgagcgtggtctcctccgagacaaaaaagccgtcggtctcgccggcgagcgtcttgaggaaggtcgagcagccactgcagagagccaagacaagatatcagcgagcgacgatgacagcacactcgaaagaggctgggcgcacctgccaggagggccgaggacgacgagcatctcgcccgggtgcaggacgccatcgacgccctggaggatctggaccttgcgcttacccttgctgccgatcatgcttttaagcccgccccaggccttgagcgggccgttgccgaccgtcgtctggtactcaaagtcggagccaaagccgtggacattgagattgtcgaacgcaacgccggcccggcgccgaggcggcgcgtcctcgtcttggctcgcgagctggacgacggccttcgaccaggccttggggtcaaacttgtcgccccaggggtcaaagatcgacccgtcggtcgggttgagtgggtcgcccgcgccggcatggaccgacgaccggtgcgacatggtccgggcgaggttgtggatgtcctggccgcggcgggcatcgctctcgtcgtcgtcgacgggacggctgccatcgagcgtggcgtcgtcggacccgccgtcctggacatgatgccgctggttgtggtagggcgagctcgtcagagccgtctgcttgtcatcgttggaggtgaagttgccgacgagagacatggtgaaggaaggggaatggaggctccgagagctggtcgaggcgaccgggaggcgattctcctggggttgatcgattgcgagcggggttgcggttcttgctcgctgagttgtgtcgaccgtgcttgcttaacaggaggagacggatgttgcgacggtggatcgttggaaagaacaacaggcgctcccgttcctggtgctcgccttcttgaggcaggggcacgacctcgttcgagtgctcggcggccgggcgtcgacccgctgctgcgcacgctcgcacgcttcctccggcgcccgggcgtttcgaccgtcagccctccttttccttcggcggcccgaacctccgagagatgagcaaaaggcctagtcgagattgctcagctcggctccaagcaggtacgtacctcgctccgcccgagccagcgcatgctggagatcttaggcagacgtaaagacgcttctcgcgctctgagactcgtcgtctcgtcatccggccgtggctgatgactgggcgtcgccagcctggctgggccaaggcagcgccttgcacgcacgctccctgccttcgcgctttccacgatctcgggccgcatcatcgaccgacaggaggcgatggctttggcggaaggaatttatcagcacgctcgccacccctgcctctgctgttgcgaaggacgcaagccctcgtgaaaggggcccgacctttctcgcgcccggcccggcggccgaggtcggacccgaaagctgcctccgtcgcgccatatcggtgagtacccccgttgagccatcccagcagacgcaatcgccctccgatccgctctgcagcaggcacagaggtggagctcgaaaatcactgaatgcggccggagggattgcaggaggaaggacggtcgcagaggcgctcctcgggaggaagggcgcgcaaccatcgacgggcagcacgaagcaccgtaccgcctgccggcggccggcagctagccattatgcaccacattcgacacacgctcagcgcgtccagccctcggcccatcttgctttatggcagctacgctcgactcgatcaataaaattgacataattcagaaactcctcctcgcctctctaattccgccggacctggccgggcggaccgacgacatctggcggctccctggcagacggcacggggcacgcagcggccccgtggtcggtcgagcggcagatggggcagactgcgagcgaaagcgggttggcggtcagcgactatgggtaaagcacgtcaaaagagagcgggcagtgggacgcgctgtgggcttgtcgactggtaaaggggagagcgcgtcgcgtcagcaacaatccggcagtgaagaagggcgagggctgagacgaaccagttgggcgacgggcacttgttgccgctggctgtaaaagcaagcgcgagaagcagacaaccagagtcagcctgcacggtagcctacaaggcatggtgatgagacggcggtcgacatactgaaggagaagcacagcgtctgctcgccgaagcgcatcgcaatgtacttgccattttgggccggctcggctgtgaggcattggaggcccgctttcgtccggggatccttgcactcgtggacgttgctaaagcaggagggcggaagggagagtcagacgggaggcccgcagccagtcaaagaggcggccgtgaatgggaatgcactgatccttgaagccgcagcggtactagaaagcgcaagaggataatcgtcagttggcgacgagagcgacagaagaagcgcgacacgacgcacgcagtggtttttactgatggctctggttgccggcggctgaggcgcctgacgtgacggtccagccaagggtcccgccggctgctgatgcatcatcatcggcggcagcagcggctgcggaggatacgagaaaggcggtctctgaccgccaggcggtagcgcaaacctcggtccgccgtcgttggaagccggctgcctggcccaatcgggggcgtacgggtcgtccatcctcggccgcttatagcggccgtcgtcgtacccgtcaaagccacccattgacaccggcggcggaggcggaccaccgggaggacgcggatagtagtcggcaggcggagtgggatccgaagagggccgctttaaagggtagccgctggaaggagggggatgcgagatatagctcggatgcgaagagggaggaaagtgaggagggggagtcggtcggaaagacgagcgcgcttcgtcccgccgggcaagagcatcgtccatccaggacggccggctaaaagtcttctgcacacccgaggcagagccgtctgcactcgagcccgcagagggcgaccgccgttcgcttggacgggaagcggagccaggcaagatggtcggggacaggacggggacattttctctgccgtcactgcgaagcgatccttggctggtgcccgggatcgcgctcaatgcatgactgggaagagtgagcgacgcaggccgctcactaagatcctggcgcaggctggccggatcgacggccgactcaggcgtctgcggctcagctttaatctgcgattcactcggacgtccctgtgtctcctcaaaaacccgagttggctgcagggcacggtacgtgacgaagcgggggatcagaggcgcgctgccaggcgccagacgagcgcacgagcggagaagagaacgctgcgacgtacaagggatacagcattcgcggcagcggctgatcgaggaggtgcaggtgcaggcggcgccggcataaagaaggaaaagacctttgaaaggaggccaccgccgaatgctggcttggtcgcaagatcggacgactggagcggactgctcgagcctgtatggtctggtactgtttgaaaggtcggacgagagatgacaagcaccggggcaagcgcccggaagagggcgaccgcgctgctcggaggcaacggggggggggggggttcacgtcgcagtcagcatctcgctcagtgaccctaacagctccccgacacgcacgcacgcattggcgtcggcgtcaagccctgcgtgctcggcacctggcagcccgacctgctgttgtatcgcactacttccgccaatggcccgagccagtgctccgctgacggcgtcgagcacctggaggcggagctcgtctggcaggcggcctgccgagagcagaccggccgccggccccgcgtcggccgtgcgagccagacgaccaattcgaaggagcagtgcgtccgcctttgcggctgtagagacccgtgccgtcggctgctgcggccgttggcgagggtcgactgtcggcgagcttgctgaggcgggcgggagggcggcgcttcggcttgacgcgtacgacggcgtcggcgaaggcaaagcgccggtcaaaggcacagatggtgtcgcgctcgccatctgagcgtcactggatctgccgtccatacggaaggaaaagagtcgtagatgaggttgtcgtcgtcgagttgtcgtcgtcgtcgcagcgtcggccgcgactcgatcgcccctgtgcgggtgggtcacttagggttatcgacagatttcggcgcgctgcgcctgcctgcgccttccgctgctgcagcaagctcgagctctcgctcgactgaccgccaccgcttacccctctctcccgcctctctcccaagtcgttatggataagcctgccaaggctcatcgagcgccctccgccggtcggagcgccgacaaaaagaagccggccgagaaggctgccgagaagggcggcttcaatgcaaaggtcagtcggctccctccctctcgagctcgcagcactcctgcacctctagccctgttcggccagacgactgatcagcacccacacctgtccctccaggcctttgctccgacttcgggccggaacgccaacctccagggccggcgcaaggccgagaaggaccagacgcggcttcatgtgcctcgggtcgaccggacgcccgacgacgagccgccgccggtcgtcgtcgccgtcgtcggcccgccgggcgtcggcaagagcacgctaatgaagagtctcgtcaagcgcttcacgaagcacaatttgagcgagattcgtggaccggtcaccgttgtctcgggtgcgtcgtcttgtcgagcagcagcgccggctcaagtcggccggctcctgaggatgccacgcagctgatacaccctcctcttcgtcctgccttcccttcctcctctcttcctctcataatcgtcgccgtttttcctgtccatccggcccgacgctggccgattcgcaggcaagcaccgccgcctgacgttcattgagtgcgcgaacgaccttaacgccatgatcgacgtcgccaaagtggccgacctcgtcctcctcatgatcgacggctccttcggcttcgagatggtgcgctcctttgagcagatcactcgtcgagagcagcgctgacccgcccgtcgccatttgcaggagacgttcgagttcctcaacattcttcagtcgcacggtttccccaaggtcatcggtgtcctcacgcacctcgacctgatcaagaagacgtcgacgctccgggcccagaagaaggcgctcaagacgcgtttctggaaggagatctatgctggtgccaagctcttctacctctcgggcgtcatcaacggccgctacccggaccaggagattctcaacctcggccgcttcatcagcgtcatgaagttccggccgctcgtgttccgcaacacccgtgcgttctcttgtactttgccgcgttgctgctcgctgcgcacgaggactgatcgcgctcggcatgtgacagacccctaccttctggccgaccgtctgcaggatctgacgccgccccagctgatcgccgccaaccccctcgtcgaccggacgatcacgctctacggctacctgcgcggcatcaacctgcccgcctcgggctcgcgcgtccacatccccggcgcgggcgacctgacgattgcctcggtcgagaagctcaaggacccgtgcccgctgccgacggtcgagggcgagaagcgccggcggatgggcgagaagggcaagctcatccacgccccgatgagcgacgtcggcggcgtcatgtacgataaggacgccgtctacgtcaatgtcctcggcagctttactcgccgcaaggagggcgaggagctcggcgaggatggcaagcggctcggtgcgttcatgtcggacctgatcagtcacggagggactccaggctgacttacgcgtctcttgtcgctgcatcacccagtcaaccagggcgagggcgagcgcatggtgatggacctgcaggatgcgacgtcgaccctgcatggccaggttgccaacgcggacctccgtctctttggctcgtccaaggcgcccgtccagctcgccgccgaggccgacgacgacgagtcggacaacgacgccgacgactttggttccgacctcggtgaggacgactttggctcggaggatgacgacgacgacgagatgggcgactcggatgaggctggcccgtcgacgacggtccgctacaccggaggccgggcgacgcctcgtcagcccaagggcctgccctctgacccgatctcggccgtcagcaagggcaagggccgtgcgaccgatgacggcgacgagtcggactcagacctcgacgtcggcaacgccggcggcttcatccaggatggcgccgcctttgacgtctctgacgacgacgacgtctcggacggtgccgaggacgtgcccaagtggaagcgcaacctcgtcggcaaggcgctcgaggcccacgccgagcgaaccgacgccaagccaaagaacctgatgaagctcatctacagctcggacttgacgccggccgaggttgtcgcgacgcatgctggtcgcggcggggccgttgcgtcggaagccaagccgtcggatgacctgtttgaactcaagcacccgcggcggtcagccggcgacgacgactcggacgagacgcggccagtcgtcgacctcagcctgctcaagggctgggacgacgagagcatgctcgacgccatcaagtcgctcttcataacgggcgagacggcggccgacggcgaggctgacgaggaggccgccgacgatgacgaggaggctggcggtgactttgaggacctcgaggcgacgggcgaggccggcgactcgaccgccaagtctgccttccctgaggaggccgacgaggaagcccgggcggccgcgctcgcgagtaagaaggcggcgctcaagcgcaagtttgacgagcagtacgacgatgcctcggacgacgaggacggcgagaccttctacgacaagaagaaggccgagatggcggcccagctccagctgaaccgcgacgagtttgccggcgacgatgaggagacgcgcgcgctcgtcgagggctaccgacccgggtcgtacctccggatcgagctctccaacgtgccgtgcgagatggtcgagaactttgacccgcgcttcccgatcattgtcggtggcctgctcgcggccgaggagcgctttggcttcctgacggtccggatcaagcgccaccggtggcacaccaagattctcaagacgaacgacccgctcatcttttcgctcggctggcggcgcttccagtcgatcccaatctaccacctcgacgaccactcaatccggaatcggctgcttaagtacacgcccgagcacatgcactgcggcgcgaccttctacggcccggtctcgcttcccaacacgggcttctgcgccttcaacacgctcgacgcgagccagcctgggttccgcatctcggcgacgggcgtcgtgctcgacattgaccggtcgaccaagatcgtcaagaagctcaagctgacgggcacgccgtacaaaatcttcaaaaacacggccttcatcaaagacatgttcaactctggcctcgaggttgccaagtttgaaggcgcgagcgtcaagacggtctcgggcatcagaggccaaatcaagaaggtcatgcccaagcccgatggcgcctaccgtgcggcgttcgaggacaagattctcatgtcgggtgtgtcccctgccgtcgtttccaacccctcttagccaagagctgacagtctccctaccttcgctagacatcgtcttcctccgggcctggctctcggtcgagccgcgcaagttctacaacccggtcacctcgctcctgctcgccgacaagagcgcctgggcgggcatgcgcctgcttggcaagatccggcgcgacgaagggctcaagacgccgctccacgtcaactcgacctacaagccggtcgagcggacgacgcggcactttaacccgctcaagattccccgagcgatccagaaggacctgccgtacgcgtccaagattaaggcgatgcggccgcagaaggagcagacatacctccagaagcgggccgtcgtcatgacggccgacgagcgcaaagcgagcgcgctcctccagagcatgcagagtctccagaaggacaaggtccagcgccgcaaggacaagcaggaggtgcgtttcgagtctccctttccctcccgcgcgagtccatcggctgaccgcttgcctctccttggcttggcccccgacgacaggagcgcaaggtcgcctaccgcaagaaggtcgaaaacaccgacgagcgcaaggccgagcaccagaaggaggagcgccgcaaggtcctccggctcaacgcgatcaagagcaagcgcgacgaggccgagggctccaagcacggctcaaagcggccaaagaaggcgtgagcgcgcggcgtgtttatcatggccatcgttccgtcgcaaggaccgcttgtaaagggggggtagcggctggcgacatcggcatcgcagggcaagagatagggccgtttgactggcagagtccggtgggagagagagaggcagttgaggaagagggtcgccacgcgacctcagacgccgttggcggggagctcgtacctgagcggcagagaaaggcgttagttccgaggttaagagcgcacgaacagcaggacgcacgggcaggcaatgtttgagatttgggtcgacgtctgggtcgagcccggccggcctttggcctcgagcgtgagctcgagccggagcaggagcgacgagcgctccgtcccgacgaagatatgcttgcaagcgtcgtaaaagtcgagccaggtcgtgtcgctcgaattgacggcggcgtactggaagcggaccggcatcgcaaaattgtagagcgtctttgccggcatcgtcccgtcccagcggccggaaccgacctgcttctcctcgtcaatgtagaaaagcttggcgtcaatcgtcgtgtggacggggatgtaggccgcgcccgtgtcggcctggagggcgagcgtagcgttgaagccaaagttggcgggcgtgcgcgagaaggagatgtactcggtcgtgttggtcgcgttggcgacggccgcaaagggctgcttgctcgcaaaggcgaacgaggggatctgcaggggccggagagatgtcagagacgggttgagcgtgcgatcttggtaggtcagcgtacccgaggaaggaggaagtagacgagcagggcagtactgaagggggaagtctctcgtatcagcgcgctagccagggtgttacaaagcgacccgccgcagacgcacatgatgacggccgcgaaaccggcccagacgaggacgatccgaaggctgaagcggccgcagcaccgatcgcggtcttcgtcccggacaaacgccttccagcggctgtcgcgccggttcgcacgctcctctttccttccgcggcgcgagaggtcatgtagctcagacttcttccagctgcggcagcggcggcgagggcgggcgagcggaggcgggtcagcgtcggagaggcgtgcgaacggctgagagcgacaggacccactcggcgccgagcatcgggaccgtaacgagctcgctcatctgtcgctgcgactcgctcatgccgctccccgctcctgccccgagcttcttctcgtccgggtacatgccccggccagcgaggagcgacgtgttcgagtcgtactgccggaggctgccgccggccgacgacatgcggttcgggccggcgctcgaggacggcacaatgggctggccgccaccgacggggacgccgccgtagacggagggcgtcgaggtgtaagtcgacatggcgcgcgatgagcgggcgttgctgaagaggcgagcgcagcaggtcagccttcgcggcctcgaaacgctggcgacctaagcgcgctgattagagcgacacgtaccgagcattggcgacaaagcgctcgccctcgatgcccggccccagatgcgggcgagccgagagcctcgggccggcgttgttgaagtctgcgtgcgagcgaaagacagggcgaagctcatcggtcaggtcagcccctgctcgcatcgaccggcccgacaaaggcaagcgacgagcaaacggaccggcataggcgtcccagtcgtcctctccgcctccctcaggtgcgccatagccgtcgtcgctctcttcgtcttcctcctcgccccagcgcatgcctccgccagctgccggccggccgctgccgccgctgccgcgcggaccagcgagctcctcgtcctgccggtctcgatagcggccgcccgtcgtctggtccgccgcatagtaactgctccggccggcggcttgcgtacgcggccggcctgactgccagcgctcggacccggcgctggcgccgccggccgatgaaggcgggtagccgccgaccgacgagccgcgagagtggcgcgactggtggcgcggccgattggctgacgacgacgaaggcggcggtggcgaaggcgaggcgtcgcggagggggatcgactcgtgcggtctcggaggaggcatggctggcgagcgggtcggtcggggggaggaagagggtgagagttgggagaagaggagcgaggggaggcggcggccggcagaaggtcggtcactcggcgagggcgttgatgcgcgggggtcgatcgtcgtgcgagttaaagactctactctttccttcatcttggaagtaggctggcaagtaagagaacagggaatagctcgtcgactgcagagatctcgttgctctcgttgacgcttctgatcagaaggaggcgctctcaaggccggctcggcgagttggacgacgcgcagcaacacatccattcggaggctcgcatgctcaacgctcatgggcacgatggcaaaggtgtctcgacgaggtcatcaaggtcgagcatcttgaacgcccgacggcagcctacgccgggcacgagtagcagggctggtgctgacgcctggcaagctgggcaggcaatccggccgacaccctctggcggcgctccgaacctagcggctgtcgaagagacgaagacaaagaggccgacagcatgcccgaggagggacaggggtctggtaaggaagagcggagaaggggggtccgtggtgagagagggagctgatgaggttttgctggaaggcgtcgcacgacagcgttggaaggcactcgagccccttctactgggtacctccaaaccgggctgcggtacctgttcggaggctaagaatacgcgggcatgataagacatcagagcgtgccgtcagtcccgtaagcgcaggaggggcagcagaggtgttgaagcccgatagccgagcgtccggcgcacgcgcagcagaaccgtaccccttgtaccggaccgcccagagcacgtcgcccggccgcaacttgagacctcgtccgcacttgactgagggttcttgctctggaaaggcagctctatggcacacacgtctagcgaaaccggacataggtagagcgtgcacaatggtgggccgaagagccaggaagcagaggggagcgcggtgatacacgttttgaggagggacgagcaggacacggacgacgtcttagttctgcggagcgtcgctgtcgggccgaagagtctttttgtggccaaagagggagagcagtatgacggtcagtaacggtccaagagaagggaagaggcaaagaagctggacgtacgcggacagccttgccggcgcgccagatctcctggttgttaatgacgtcgagctccttctggaggtcctcgcggtacgtcttgcggccgttgaactcaagcgaccgccgcgtctcggatccgtccttgcacgactggtagagctcgcggaagacgggcaggttggccgcctcaaacttgggcgcccagtcgagcgcgccacggcgcgccgtcgtcgagcaggcgttgtacatgtagtccatgccgtacttgccgatgagcgggaagagcgactgggtagcctcctcgaccgtctcgttgaaggcctccgaaggcgagtggccgttctcacgcaggacctggtactgagcgaggaacatgccctggatgccgcccatgagctgcgacaaaggcgaggatgggaggagggggtgtcagcggcagagtaagattgggcgagtcgcaaaggggaaaggaacgcacgacaccgcgctctccgtagaggtccgagaagacctccttctggaacgtcgtctcgtaagcgtaaccggtgccgacggcgacggcaagagcgcgcgccttctccatcgccttgcccgtgacgtcctggtggacggcgatcgaggcgttgatgccgcggccctccttgaagagcgtgcggacggtccggcccgaccccttgggggcaacgaggatgacgtcgacgtccggcgggcagacgacgcccgtctgttcgcacagggcagagcagcgagccgcaaaaattagcactcccgcaaacgcacgacatcgcaaggagtgaagtgggcgcgaaactcacgtccttgtcgtaaacgaccgagaagccgtgcgagaagtagagcgtcttgcccttggtgatgaggggcgcgagctgactccacgtctgcgactgagcggcgtccgagaggaggttcatgatgacggtgcccttgttaatggcctcctcgataccgaagagggtctcgccagggacccagccgtcctcctgggcctgcttccaactgcggcgcgagcgaaaagaaaaaaaagaagggagagtggtcagcgaggtgccggacgacgaaggggggaaggggagaacgcacgactcgccgccctcacggacgccgacgatgaccttgatgccgttgtcgcgggcgttgaggccctggccgtggccctgcgagccgtagccgataagagcgagcgtgtcgtccttgaggtaccttttcacaatcgcggagcaaaagcagcgggggtcaggatcctttgaaatggggctcgagcaagaggactacgaccccgcgcgcgaaagaggcgcgatcaaaaaaggcggggagggaggcgcgcccaacccgagatgggctgaagggaggcgccctcttggcaagaggagagcaaggagaaggggggacgcactcctggagcttggggagcggccagtcggcccgctcgtagacgacctccttcgtcccggcaaagtcaatcgtcttcatgccgcgctgtgagggagcgaaaggggggaaagcgggagcggcagggcaagggcaagggcggaggcgcggaagacgggcgcgttggagaaagcgatgaggcagaaaggaatgagagggcgtagggcgtcagtctccagctagccgggctgcttcgcgcgccatcctctcgcgtcactcccaggccgaccgatggcaacgagcggagcgactgaaggacaagaggaggactgacagcaagcgccggtgcggcgggagcagccgccttgcgagcgagcgccggccgagcagcaaggacggtcgagaaggcgcgcttggccgaagcctgagcgagcgccttgcgggcgatagagcggggggcagccatgttgttaagatgagagagagaggggtgatggagggaggagagagaaggaacggcgggcgggctaaaaaggctgggcttgggcgcgagtcagacggccaggccgaagggggccgaagcgcgcaggaaggacggcccaaaccgtcgactggattgggcgaatcgggcccaaagcgcccaatcccaactgggcctgttcgattcgccgattggggcgaaagcccctttctcgtctctcgcgtcgagggcctctgtcccgcgatcacccactctcccatgcccggtcgacgagaggcaggtcggcgacgtccagcctgtcatgtccactgtcgcttggcataaacaaaagccagctccaggaagggcacgaagggcagagcagctcgacggcgactagagctcaggttagcgcgcgcgccgggctgtcagctgaatcggggctcaattcacggtttggcaccgccaattgggccaattggcccaatcgaatcgtcggtcgttcatccctaggcgagcgggccaagcgccgcgagcgccttcgggtggtgagtccgaaacgtcaaatggcagagctcgctcgcaatcgccctggtcccaactgaccctttttgtcaattctgagaggggagggcatgagattcgaagtattaatgcgagaggcctaggctaagtgaagagggaagaaagccgcgaccggcaacacgccctcacagcaccaacgccctacaccctgccgaccgggacgaagcgaaagccaagaaagagagagagagaggagaaagggactcgttccgtcaacatcggccccggtgtggccagtggaggatcaaaagcccccctcttctttctccctttcctcttttttcgttcgttcgaccgggcggggggcgtggtgttggggtcgtgctgcacgcaggcgggcgggcggaggcggggcgaaaggtcggttagagcgacgtgaaggggtgtgtgtcgcgagtgacggcaagagggcgaagggagacaaaggctacagagagtgatgcgggtcggggcggggaagtcgttgcgcgtgagataggtcgttttgaaaggtagccgaaggcagaagggctgaagagtcgagagaagtagcgggtgtcagtcccaaaggtcatgcgctgcggtcgtcgctaccgagaaaactcacaggacagggatgagcataagaaaagggagagaaggcggtcaagccgcacgagcgagtatctccccaagcagcgcccaatcgagcccccccttccccgcatcgtcgtcgtcgtcggcgtctagtagcagccgacgctcctcgggctgcccatcccgcccagcccgagcccgaggtccgtaaactcctgcttggcgagcgcccgcttctcggtcggcccgctcgcaccgccgacgctgttgctgttgctgctgctgctgctggttgccgccagggcagagccgggtgttgccgatccgttcgaggtggagtttgacgagctcgcgccggcctggtgctgcgccatgaacccgttcagacactcgagcccgagtgcgccaagctcgatcggcgagattggccgcttcggccccctcaaccccgccccggccgccgtcggcgccgtcgatgtcgacttcgtgcaggtgagcttcggcggccggctgttgctggccgaggaggaaggcgaggcactgctgctgttcccgctcgaactcgatgggccagccatgctgttggtggtgttgttggcgagcgaggcggccgtgcccgagaagactcgctggaggtgccgcgagccgcggccgagcgccgagcgggatgagcggctgcagtctggcgccgcggttgaggtcgatgtcgaggctgtcggctgcttggttgttgccggcggcgccgttgaggaagccgtcggaggcttggctggagggtgaagcgaggctgtcgatgtagaccgcaagaggagtgtcggcgtcccaggtctcgggagcgggatcgtcgctgccgcggctggcagggtccgtggtgacgccggaggcgagatctgcataggcgatccagggcgggacgatgtccgcctgaggagtgccgggaggggcctgcccgccgagcgcgcgaccgaggccgtgagaggcgagctggtggccggagcgaggttggaggacgaaggaagaaggagaggtgacgggacccgctgctggggtagggtgaaccatcgtgctgatggcgaagtgcccgtctcttttccgttcagttgtccgccgttgtcgttctggttgccgttgctgcagccgttgttgccgagcgtcttgctgccggggaggaggaggaggtgctggccgctgttgtcgtcggccgccgtcgggacagacgagaccgactcgaacgagatgtctgacatcgggctcgagtcccgccgcagccgccggccgtcatcggcggcagggttgggcgaaccaaccggggccagtccatccgcgacaaactcaaagtcggcgagcgcgccctcgtcgccgccgccgccgaccgtcgcgaacgggttgaggaactctgcaaagtcgggcgagagcggcggcgatgacgggtcgtcgacggccggcgaggtcgggacggacgccgcaaagtcgaatgtaaagcgtccgtcggatccggacgagtcgaacggctggaggccatccatcggcgagagctcgtgcggcgaaggagggtagccaaatgtactcgtccggccgaccgcgagaggggcaagggccggcggcggaaagctcgcgttggcgaggatgtgctcggcaaacgcgagctgagcgggcgtaaagctcccaaacgagctcgcggcgtcatcctccgaagagacgacggtagacatttcgggcaccgccgtcgactcgtgcgcgtgagggtcgacaaggccgcccattgcgagcggctcgacgactgagccctcgacggccggcgcctggccgagcaggcggacaagcccacggacgagctcctcgagcttaccaacgcgcgcgcggaggtcggcgttctccttctcgagcgcgagccggcggaccaggccgtcgtcagtggtaagcggagggggtatgtgcttggccgatgaggacgaggacgcggtggtgggaggcggcgtcgggagccgattcgaggtggtggtggtggtggacggcccgacggcggcggtggacgagtccgtcgagtcagcggctgccggaagcggccgaccgccgagcgcggccgtcagctgagcctcgagctcggctacccggatctcaagctcatgctggtgattcttctttgcatcgcgcgagcgctgggccgactcgcgattgcctgctcgatcgagaggggccgccggtgcaggagaggagggatcagccacttggccgaagcgaaagccggaaagcagagcagcacgcacgaagtacacgggcgcggcgacggctctcgctcctgaaagcaaaatcagaaagggaggcataaaggtcgtcagatatcggccggtgcatgaaggggggatcgagcgcacgcgcgcgggcccgcacgagtcaaagggcgagagaggagacgtacaagctgattccgggctcgttgacgtcgcctggtccagtgccggtgccgatgagctcgccgacgccgccgccgatcgtcgggtggccgccggcgtgcgaggtcgagggtgcggctgagccggcacggctgctgctgctggcgtcggtcgctccaccgccgacggctgctgttgctgacgcggtcgaggacgaggcggccgagggtgcgggcgagggcgggccgtcgaaggtgagggacgagacggaggacttgcgcttcttgctctggtgctgcatgcggagggtgaaggggtggatgggagggaggaggaggaggtgagggtcgatggacgacgagaggagccttcgctcgagcccctcgccgggcgctgacccagcggcgcgcagcagcagcagcagccgatccccggacaaggcgacgcgaggccgagaaagccaaaagaaatcccaaaggtcgctcgctccgaacctccacgtcagcagctttcgagtgccttctgcggcgcacaacccattgcatctctcgaagcaacaggacaagagggcagcgaggcagctgctgtggtcgcatgagaggcaaccagccctgcacgacaagcagcaggaacggccgggagcgagcgggcttgcgtcagtcgtccgccgccgccgccgttggcaaggccgttggagtcggaaggcgatgctgcgggagttgccatcgcagacatcggccgctgacgagctaacctcctcaaggcagtcgagtcgggtctcgtagtgctcaccttctcttccgaccgccgaccgcagcgggtccggggctgaatcttttgtgctgacttttgagacgactggagggacgtttgggcgctatcgtgggccggttcctgccgctcggcaggcgagtcgttgggtcgggtgggcgaagcgtcgcagacaccctcatctcgagtgcagcagccctgcagagggctgcttggctgctactggacagcatggctgtcgctttcgcttccagctggacgctaaggggccttctctcgaaaccggtgcaagtctccaaccgcacctgccctcgtgcctggtcgagcagaaaggcctacgctgacaccacagacttcggccgacgtagaggtgccaggcatggctgggtcgtcttagcgcttgcgtcgatcgtggcgacaaggcgcagggccttgtccggctttacgtcacctacctcggcctctttcggcgtccttttcgctcgtcctgcctcctcgccggccggctcacatcgacaagctcaaatgtcgccacgtacggctatgctgcagcgacgtggtcatgaaagcgcgcccccctcggtcgaccggactcaacgcgaggcgcgactgcttttggctcaagggtgcctgacgctgcgcgcgcgcttccaccgccatctcctccgaggcaccctccctgaccgacgcgtcgcctccgtcctgataacagcgcctgtccgtcgacgcgacgtggcggggcttcggtttgggtggacaaaggctgaccagctcgcaatgcagctcgcctcgcttctctctctcagcgccatccctccaacccctctcgcgccacccccttccccctcctcgctttcgcccgccccgcccgcaggacaaccacatcacgatcgacggcgacaccaacgtctcgttcaccgaggacgtcgagaagcgcttcgagtcgtacggctgggagcacgtccacgtcgccaacggcgactctgacctctcggccatcgcgaccgccatcgctgaggccaagacgaccaacaagccgacgctcatccggctgacgacgacgatcggctttggctccaagattcagggcacgcacggcgtccacggcgcgccgctcaaggccgacgacattgtctcggtcaaggagaagtttggcttcaaccccgacgagaagtttgccgtccccgacgcgaccaaggaggtctatgccaaggtcgcggccgagggcaaggagaagaacgagaagtgggacgccctcctcaagagctacggcgagaagttccccaaggagcacgccgagctcacgcgccggatcgccggtgacctgcccgagggctgggagaagaaccgtgggtgcccccttcgtttctccgcttggagtaggacaatcccggctgacctcttaccctcgcctctgtagtccccgtctacaagaagggcgacgccgccgtcggctcgcgcaagtactccgaggctgtcatccagtcgctcgccaacgtcatccccgacctcatcggcggctctgccgacctgaccggctcgaacttcacaatctggaaggaggccaaggacttccagcccgagggcgtcgccgccaagggtggctacgacgggcgctacatccgctacggcgtccgtgagcacgcgatgggctcgatcatgaacggccttcacgcctacggtgctatcatccccttcggtggcaccttcctcaactttgtctcgtacgctgccggcgccgtccggctctcggccctttcgcaccaccaggtgatttgggtcgcaacgcacgactcgatcggcctcggcgaggacggcccgacccaccagccggtcgagacggtcgcctggctgcgcgcgacgcccaacacggccgtctggcgccctgccgacggcaacgagacgtctgccgcctacctcgtcgccctcaagtccaagtcgacgccatcggtcctcgccctctcgcgccagaacctgccgcagcttgagaactcgacgattgagaacgcggtcaagggcggctatgttgtccacgatgagcagaacgccgacattacgcttgtctcgaccggttccgaggtctgcctcgccgtcgaggcggccgagatcctcgccaagaagggcgtcaaggcccgcgtcgtctcgctcccgtgctggctcgtctttgaggctcagtccaagaagtacaagctctcggtcctcccctcgggccacccggtcctcgccatcgaggcttacaacatgatgggctggtcgacgtacagccatgagcagttcggtcttactggcttcggtgcttcgggcccttgtgcgttcccgctctctacacgattaccttgtctcctcgcgacgggacactccgactgactgcgcgcccctctccctgcccctttccagacgccaaggtctacgaccactttgagctcaacggcgagggcatcgccgcccgggccgagaaggtgcgctcgtcatccctgcgccaggatcggttgctcctctggtcgcttcgcctgctgacctcgatctccttccctcatcctcctttccgcctaggtcacggccttctacaagcagaagggcggccccgtcgtctcgcccctcatctcggccctctccggcatcaccgaggccgacgccaactaggcgtctttccccgctccttcgcattcgccccctcttggccgggcacggccaggcatccgcccatcccgttcgctcctcccgtgtagccccgccccttctttcgtgccctgtctccagagtgtgtcttagatgttttccgcttctctctagccctctagtcctgcgaggggcgacgaagtcaagaaggatgtgttcggcggtggctgccctgggggaccgctgatgccgttctggcgctgcaagtcagtcagcaaagtctctcctcgtccgaacaccctcctagcatagctgggcacaggagggtccagctgggtcttctgggataaaaaatgggctcatcaaggcttctggaggcctcatgagatcgtgcaattgtcagcgaacctcaggagggtcgctgtggctgacagccgccagcgggtcccaagagggggctccaaagccagcctgagccgacgcgatacgcacgccgccgtgacgccgcgggtcgagcatgcaccgagtacttgtactacttacgaccatcgacgacttttaccatgcccaactctgttcctgacgatagctagtgacgcgacgcgaacgcgtactcgtctgtcggctcgcccttgctgcgctgcgcgcggccgccctcctcattcccgcccaaccttgcgtagtgacatgcaagcaggcaccagcaggtccgaattcgtgggaagcaaaaaagtgaatcgtagtcagacgctccgccattgagccacccggccctcattagagggagattggaatccagttagaccagggcaggactcgaacccgcaacctcctgattgacgatttaaccgttgagcgaacggtaattgtgatagcagatggacttcaatcaactaataatctgtaaaagtttctcttccccgtactccatattccctttccgcctttacgatcctcaggatcacatgtgatgtggctggcgcacgaatttctcctgattgacgaccgtgctggagatcgtctgaccgccagaccttattgtatggaggtgggaccacacttcgtcaatagcagcagcggtcgcatgcctcgaatcttgctcgcagccgcatatccaagaagccctcggaagcagcgtggcagggcataacaggcatcagatcgagtcgtgaacaacgtgatgggtgggtgaagttgaagggcaggtgcagagtacaaggagaggaagtgaggcagtagacgtgaggcgaatgtgaggcaggcaatactaggtccgcgacggggcgcttctgggcacgagggtctggcgcctacacgagacgctgatcagggcgcgaattggaaagagtggcttgcgcctggcgtgactgctactgtggcctacgaccgccttgccgcttcgatcgctgcccggcgtgcgacacggtcgcggtcgtcctcgatctgcagacagtggcgcatggctcgtcagtgcgcgtttcaagttcgtcaggagagacgggcgaatcaaggacgcacggctgcgagcgtccgggcgcggatctcggccagctcctccttgttgctccggacgttcgcacggcctttttcggccctgcagacggtcagcatgctctgatcagtcactgaactaggttgagagcacaggaataaggccgcaccgctccttgatgatggcctcctttgccttgaggcacgcgtgaccgatcttgagcagctcgaggtacgtaatccgcccgcccttctgcgcgccgagcgctgaagggctcatcagcgtcgattcaaagacccaatgctgctcaaaagcgaccgtcttggtccggaagccgagctgttcggttcaagacacatgagtgcgagagtcagccgacgtgtgctgcgcacgaccgggacgagatgctgagtccaatcgcacctggacgagggcgtcccgcccgccagagatgtcgagcacgtcgctcctgagcttctttgaggcggccttgatcgagcggaaggctgggtcgtctgggtgctcgacgatgttgcctgcgatgaccagcagtgtctgcgaggcgatggtgggagggtcagcccgtcgaagctcgacgtaagccggccgattgaccgacgcacactgatgaccttctcggcctgaaggaacaagacgtgagaggtcagcttgacgtccgagagacgaaggcgcaccaggcaggcaagcgacctggacgtaagtgttgggcccgacgagcgagcgctcgatgaagcgctgccagtcacgctccttctcgagcaggcaatgctgcttgagcgtccctccgtccggatcgctctcgcccttgtcgtttgttggggcaagccgggcgagagcggcagcagctcgagcttccctcgatgggccctaggcaggaggggctggcttctgcgacgacgaggggctcgtgaccggctccgccagagcatcgccgagcgtctggccgcgagctggcgaggagatggagaggtcgtcttcgagatcgatctctccgtttgaatcatcgctgttgtaggacatgccagcaatggttgattgaggtagcgagctggcaatggcgatgggcggtcgagcgggatgggtgtcaaggggagcgtgccggctgcgcttgagttcgactcgggcgaacaaggcagaagagcgacctcgacctcgacatccttcctccgacaccctcgtcgcccgaaccaggtgagcccagcgcacgagcatgtccgactggcctgcccatcgagcgacgtgttcgtgtcgggcggcgggacggtcgttgctttggctgtccttcgctcgcggctgacggcgagcttgtagctcgcactgcccagagcactgacggccgaccggcctcctctcctggacctgagctcgagcttggatttcgcggtcggcgaacctgtccagtcgtccacccgaggactgactctgctggctgggacccccctgcctggccgccatggccggcatgcccgagcattcgagcctcctcgccaagaggacgacacccgattcggctctcagggcccagagccatctgaccgataccttaaccgctgacccgacgactctagctggccacgggatgaggcggaggctgctgctcaaagaggcgttaaagctgcgtggaagcgcctgcttgtgcaggccgccggtctagacaggtgggttcggcttcaggcgtcgaggcttcggggagggcctcgaccagaggctactaacgcctccagctttctcgtctaaacatctccccgggccgacgccatctttaaaacctacctagcaaacgtcgtgctcgcctttccgaggccaacgccacagcaagtcggcctcaatggagaccaggaggatggtctcgcccctacccgcctcccagaacgccactagaaggagcgcccaacaaatccatcaacgacgcctctcgttgaggaacccgttcctgcgcggtccgcttgcttccgcaccctctgctcggatctgcttgggtactctgaccctcgatccacgagccagccactggacaccacaggctaacaagcagttgaaaggcgccgctgaagaggcgtcgaggaagctcgctgctttgcgaagctaatccaacgtctcagtctggatctttgccgccttttgctcgactcgattcggctgacccaggtcgacctcgagcaggcagcagggattctctataaaggggagaggagtcgcaagacggccgaaactgatcactatcgacctctcccaccaacgattctacccctcttcctgcaactcatcccccctcccctcatccaaccgttgccctcggtcaaaggggatcttccaacactcccctcctcctaccctactcggccaacatgctcgtcgacctcagcttcgtcgtcgtcgccctcgcctcgaccgctctggcgtatcctgccggccagcactcgcagctcgaggcccgtgccccggtcgataacaccctctcgcctgccaccggaggcaacgcgtttgaaacctcacagtggtacctcgcgtcgacctctatgcttcgtgagtagtctgcctgatctcggacgtcgccgccttacagagtctctgctgatccgcccccgtgtatgtttcgcactctaggtttcactgaaggcactaccgggagcccactcggagcgaaggtagacctcgccggcagcaacggtgagcattccagcatgcgcctcttctctggcgcttcagtctgctgactccttgagacctctaccaggcctctccgcttgcgcctcctcattcggaggaggaggttttgtgggcttgagtaataagacgatctgtcaccgcggcgcgccactcttggctccgtcagcctggaaccgaccccaggcaatgtccccgccctcgcctgcgttggcggcacctgtggcggcaacagcacggtcggggccatgcagctgtaccggaacatccggctctttgattcgaacttcgccccgaccctcccagccggctgggttcactctgaaacgaggctcctgaagggtcagtcgtctttctccagacctgcctactctctctgatgacgactgtgctgatcaaggcacaatctccaacgctcagtcgccaacaacgccgcacagaacgaccgccttgttggggttgctcagtctggcatcgcgaccgccaatggctgcattgcggcttgcgagaaccagggcttcgccattgccggcctcaaaaacaagtgcgtcggcttcacccttggatctgagctgcgccgagtcgttctccgcccagattgttgatgccagcctctcgtcttgcagcgtctgcgcctgcgctaacaccctcggcttttcgagggccagcctctccgtcgttgctgaggtcgatgtcctttgctccggggccggccggcagtcttgcggctcagctaccggttggctcctgtaccggcacggcgacaggaccgaccccaactaccaaccgctgccggcttacatcgcatcggttgccctagcgtctcaatcaagggtgagcgtcgcttcggtgtcgactcagtcgaccttctcggtccagtcaacggccgccgccacctcgaccgcctcagttgcctcggttgcctcaattgcctcggttgcctcggttgcctccgtcgctctcgaggagcaggccgccacctcgaccgcctcagttgcctcggttgcctcaattgcctctgtcgcctctctcgcctctgtcgcctctgtcgcttctgtcgcctctgtcgcctctgtcgcatcggtcgcctccgttgcctccgttgcatcagtcgcctccgagtcggtcgcatcaaccatctctgtcgcctcaaccgcctctgtggcctctgtcgcatcggtcgcctccgttgcctccgttgcctccgttgcctccgttgcctccgttgcccgggaatcgcttgcctccattgctctcgcggagcaggccgccctctcgaccgcttcgactgcctcggtcgcctcggtcgctgcggcctcgcgggccgccgttgctctcggacagcaggctgtcatgtcggtcgcttcgactgcctcggtcgcctcggtcgccgccgtcgctgcagcttcgcgggccgccgttgctctcggacagcaggccgccctctcggccgcttcgactgcctcggtcgcctctgtctctgcggcctctctcgcgtcagtgcgccggttgcctcaggcacccaacaaatcgacggcgacgtcgacagtgacggtgacggcaacggcgacaacaacagctcgagcaggtcgacccaaggcgtcacgtcgtgcctgacccgtattgtcgacaatgtcggctggccgcgtgctcgactttgaccggcttgcctcggacgccatgacgcacggcatgtgcacgactctgactgcgccgagggcgtttaggcggccgggcacgagttgtgcgtcccgtcctctgttctcccgctcactgccggtcgctgacagcctcccgccctgccttgcagctcgactgaacgccggtctccgcgcatctgctcctcttctgtactttccgttcccattcggttttggcgccccccgccggttaatcttgtctcatgctcgcttcctttgcttcctgctgccgaccctgcgagaccaggtgggcgctccaatgatcgaaggagggacatcatctctaaggggaaaggagacgaaagacgaaaatgctacagacgttgaaagagaaagaggcctgcgcgaggcgagggatatacagcgaggcatagggggtgaggagagagacatgcaaggtgatgcggaagtatgagttagccggtctagtacagtgtcgacattgtgcgagaagattatgagagcaacaggaggcaagacgaaagggacgagcgagaaggtggcgcaaaggtgagcgccctagaagggcgtcggcgtcgctcgcgccggcagagcggccgacatgcgccgcggtgcggtgccatgacgcttggcggcagcgggcgttccgccgccggtgcaagtggcggccgcaggagggacaatgaggccggcgtcgtacgtgctgcagggatcggcggccgcatgaggcgtcgaggtcagtgtggatattagcaagtgactgagaggcgcgagggacgaactcggggtaggcgcagccgctgatcggcacaaaggcgccctgcgtgtcgtctgggttcgtccatcccgagccgagcgtgacggtcgtcgagccctgggtgtaggtcgcggccggaagggtgaccatcgtgccggtcggcgtgctggcgggccagccagggtctcgttagcctgcggtcgacctcgaacaagcagtccaaacgcactagcggggtaggaggcttgccggcgttgcgatcgacatgagggatacgggcggccagggccggcttgccgtctgcgcggcggcgacctgaccgtcaccggccccggtcgcgtaggcagggtagttgccgtcaaacgagatcgggacggggtccgtcttggcggcgcaccggccgatggcgacgcgtgggtctcttgggatccagccctcttggaggccgagctatgaacagattgaagacaggagtggaggtagtcagcgcgcagctctcgacagagtggccattgcaacaatgctcgccaacgtacccggtagtgccagtcggcggcggacgcatagccgaggacactgctctctccgatcctggaggcgagaccggttgtaagacgccgtcagcttgaggaggagagcagatgtgcgtggcgggccgactcacttccacgtccagaagaagaagttctgaagagcgtcaaactcgtctaagatgaggttccggacctggtctttttgctcgtcggtccatctccgccagtcgcgccactgcgagcagaccgcctctggcagaaccgaggtcgacgtgccgttcggcccaatacctgaagcggaagggtgagcatcgttagcttgacctacgtagaggacggacgcgctgcgaggcactaactattgagccagtaagcacaatctgtcattgcggcggaaaactctcccgcaatggtgacaccggtccgagaagaagaagtgttggtggcgccagcccacaggcaaccgagcgtcgacttctgggcgatcggcatctcgtatagcgactgcagcgcaaatgagtgagagcgcgtcaatttcggcttcaacgctgagcgggagggcagttgaagacgtacggggtcgaaggcgaggtacctgccggatgagtaaaggaggtcagtggagagacgtaggcccaaggcgcagatagcactcacgggtgctggtccaagacgagtcggtcagcgccgggtgcgaaggaatcccatgcgttaggcccggcgaactggtcgatataggccaccatgggccccttgttgaggccgctattgaagggggtaaagaagggcgggaggaggggtgcatcagcacgcagcgtccaattgcatcggccctttcgtcctgcatcggcgggccatctcgagcctaattctgcagcagccatggccgacatatacagcccgacccggaaaaggcaaagagggtccagacgcccgagcgagaaacagagatcacgcacgtagagatccgcagcgtccggtgggcctcgaggtagaacgactcgagggcctcgcgtgagatgacgctgttggagacctcgttgaggatggagaacctgaagggaacaacaaagcccgtcaggattgcgacgctggcgacaagcagtgctcgtaaggacgcacatctggatgacgtcggtgttttctggccgcgaggcaaactggacgagcgagcgcatgaccgaaagcgaccgctcggcgttggcaatgcccatcacgccggccagcacgttgaccttgccgactgagaggacaaaaggccaggggtcagttagccgagaactcggacctcaagtgggaaggtttgaacgaactaccgcggcccgagtggttctgaatggcgcagggcaaaaaccgttagctcagcaagcagaagaaggcctgagaaggcaagcaggtgaaggcctcagaaggcaagcagataaaagcctcggaaggcactgacccatccgttctctgtcaaagatggcaggagagcggtcggtcagcttccacggcctgcgcgccgacagagaggggacgtacgcgatccgggcagggcctagaggaagcatgagcagagtcagcgccttatgataggctagacaggaggaaggccaggacgtacgtgcaggtccatgttaaccctgaggccgtactttctggcccacttcacgctgaagagggcgaagcacaacagtcagcgggcatactcaagcggcgggccaggaccgcagtgggacacgcacgccttgaggaaataactgagagaagggagagaaaggctgcaagtcagcggcggacgccgagggccgagagagaaagcgggacgtacgtccatgagacgcgctcaaggaagggctcgccctcctgcgtctcgaccgcccagaagccgataggtacgcggacgtagttgaggccggcggcggcgatctcgatgaagtcttgctcggtctgccagtccgaggagggacgtcagtccggagcgacagatgcctacgagggtcggaacgaacgatgaatgtctcgtaatgggcggtcaaggcagcctccttctcgtcgcccatcgcctggcaaagcgtgtactcgtcgatgatgttgacgccagtcttgttgcgccactcctcaaagatgccgggcgagatgaacggctcgaggacgagccagccgcctgccaaggggtaaagatttcgggtcagctcgagcaggagacaggcgcagcacagcgcatgcgggaagggccgaaccgaggttgacctggaccaagcacgcagagcgtcagcaagcaatatctcagaagaagctcaaccatcagaggccttgcactaacaccgcgggcgatgtctctgccccaggtccaggtctcgccgatcctcggcgaccagtcgttcgcccgaccgccccgaaggatgccgcccgcctcggcgtcggcgaggtcgagctgccagtcgccgccaaacgagttgacgtacgggacctcctcccccgagtcgagcatgaccatcgagccgtccgtgcccgaggtcgcgaggttgccgccgggcgaggcagaggtcgagcccgaacccgacgaggtcgagctgcttccggcgttgctgctcttgttcgactgggtgatgccgaccggaatggcgatggcggcggcgacaatcaggaagactatgacgccgatccagatcaggcggcgggagcgaggactcgaggcggccatcttgcagcaaggaagggagtgagaaggtagaggttaagagggagagagtaagcgcgaggaagaaggccttcccgctgggctgttgttgctgagcggcggcggcgcgcagccaagaggcggagccccgcgacgccatgcctcgtccagcctgggcgttttctcgcgagagcatgcacagcacaagcagccagcagccagcaacggcagcgagtgacagcgagtgacagttattggttgtgtacatcgatcgcatgctcagtcgagtctcaaacgcccagccgctcgccaatggcactcttccagccacgcgagcgctcaaagccgttcttgtagccgcggtagtcttcaaaggcctgcatgatgccctcctcgctgtcgaggacgaacggcccgtgctggaagaccttctggcccgtcaacggcttgcccgcgacaaggatgaagcgcgtcggcgtcgcgtcggccgtgtgcgccgaggcgagctcgacgccgttctcgcctgcagccgcagagaggacgacggtcgtgtagggcgggtacgacttaccgttgaccgagacagagcccgtcagggtgtagaactatgggtagaggagcgcgagtcagtcggtctcgagaattagtgcgagccgggcgcaagacgcacaaaggctgtccagccctcggggatctcctggaagaccttgctctcaccgtccggcttggcgaggttgacatcgagatagaggcagtcgaagttgtcgacgaccttgccctgcacaaagtaatagaagcgggcaagtcagcaggtgcgcttgtcgaccatcgagggcgagacacagaccttggcgccgtgcgcttcgccggcaatgaccttgatcgaaacgccgtccgctggcgtgacggtcgtgatctcggccgccttgtgctcataatatgcgggctccatcatcttgcggctcgatggcaggtcaatccagagctgaaggcccatcggcatcggtccgtccttggtgaagatgggcagctcgctgtgctcaatctggtgccagcgagggaaagggctaagtcagcacgcgcaagggagcggacaagactgcacgaaagggcgcacaccacggccggcaatcatccactgcaatgtgtcagaaagtcagcggcgtgttctcagtgcgacgatcgacacgtctgactcgcctgaaggtctccggcatctgttgagggcggcaaggctgagtcaaccatgcaatgcgtgcatgtcggcgacggaagggggacgcactgagaatcccgcggttgccggcaaagtcctcgtgctcgaaagcgcctggtcgaccggaggggttcagtcgccggaagcgagacatacgtgcagcgctcgcgacgacgcaccttcgagcatgtaggtgacggtcgacatgccgcggtgagggtgcgagtggaagccagacttctcgtcccggaagctgacctgcaagaggagaggggtgtttcgtcagtcactgggtcggccaagaagggggagggggggggtcgccgagcgtcgagaaagagagacattcagagcgttgggagccgactgaagacaaaattacgcaccatctgatcaagcatcaggaatgggctcactatgaagcggggcgagaggcagcgtggtcagtacccgacgacggctgagggttagtgctcgaagggacgtacggttccgcagctgcgccgagccgatcgagcgccggacggtcgcgccgacgccctcgggttgagcaacggccttgacggccttaacgacggagcgggaggcgtgcgaggtcatgctggtggtcgtgatggtgtcaattgtaaggtgctgctgttggcgggtgtagaggaaggcgaaggcgacggcgacgagggcggcaagcgtcgagaggagggtcgaggagcgaatgatgggcgagatgaagcgagtgctggccgagggctgagagcttcgacgaggcgggagtctggagatgagttggtggtgaatgggagtgagcgtcagtagcgagattgctctcgccctttatgagcggcctgccggcgagtcgacgacggtggtgaggtcagcgagcaagggaaggggtcgcaggcgtgggaacggcagccagcccgctgtgaacgcctcctggctcaccccgaacgtccatgctcgtcagccgcaccttctcgaaagcagcagtcgttgccttctcagtcaggtcggtctcacacgctgactccgggatcccgtcgcatgcgcgagagagctttgtcgtccaaggctgacacgagagagatggtcgccgttgctgcagcctcatgtcagccgccgcagctgccggcccgccgcctccgatggacaccatcgtcaccttcggcgacagcctgactcaggtgcgactcatctcgctgctggaccctaaagtcaggcagccggctgacagacgcgaccctcgaccctacgagcagacctgggaggagggcagtctaaatcagcggctcgcttgtgagccggtcgtcgcgtgcaggcgcccacgcgtcgtcctgctcactgaacgcacacgctgacccttgcactcgctgactgctgccagatgcttactgccgtgcgcatctcgcaagtacatgctctttgtcttagtagctgacctcgcttctcctgccaggcaagctcgacattgtcggccgtggctttggaggtccgtagtttcgccgcatctgcctccgccggtcagagaggacgcacactgaccagcacaaagctcgccctcctgccaggctataacaccgagtggtgagtctcgcatccgtgcgcgcagcatgttcctgacaggctgacccgacctccccgagaacagggcactaccaatcctcgagcacgtgcgtcccctttcgacgcgtctctggccagcctcaagttgacccgccccctctcgccccttcagatcgtccccaaggtgcctgtgccgcaagcgcctcgcatccggctcatgaccatctggttcggcgcaaacgatgcgtgcctcgcgccgtcgccgcagcacgtctgtccctgactcttgtctaaaagcgtgggcagagtattgacgcgcatctcatgctcgacagctgccgatccctaagttccaagccaacctccgggcgataatcgcccacgtccgcgcctactcgccctcgaccaagctgcttcttttgacgccgcctccaatccacgggccgacccgcgcagcgctgatggcgcctgcgccgctcgaccgtgcgcaagggacgacgaaggcttatgcgaaggccgtgctcgaggtcggccagaccgaaggcgtcgccgtgctcgacgtttttggcgcggtcgagtgcgcgctcgagggagatctcgagcaggcggcggggctgttccgcgacggccttcatttgaaccggaagggctaccaggtgcggccccgtgtctgccggttcaaccgtccacttcctacgctgacacctccgaaatttgcatcaacagattctctatgacgccttcgagaaagtcgtctgctcagagttcccagagctcgacaaggacgcgctcacgcccgtctttccgctctgggccgacattgaccggttcaatgtcgcccagagcgtcgtcccgcggccgagggacgagctgtagatcgatgtgaatctcatctcacgctcgacagaggcagcggtccgccgacgacagcgtcggccgacgagacggaaaaagacaggacatgcagcgccggtgaccctctgccttctccctttatcatctctgcgagatctggagcctgatccactcttcctgcctcttatcagtaaatggaccaggcttactgttgatctcacatgacctgctctagtctgacaaaggcgctgcctgtagggggaatgcaagcgtctgatctagaggtcagtgtggggtcagcagctgcaagatcatctgctctccgagggttcgcgagtcatctggcgataggtcgagggcgcagagcgcaatgcgagttggaggcaatagtcatggcatggggtgatcgaaaaaaaggaatacggatgtctgggcgaggcagaaggcgggagtcaggcaagggtgggcgtggggagaccttaagggggcgaagggagccggcgtagagtgagtgcttggcgagagggagaggagtcctgaggacacgcaaaggcaggagggtcagtaggtgcatcctcggtaaggaaggcgaggcgaggaggcagagggtcgtgggaggggagttcagacatataaaattgttaaggtagagcgataatttcagcatcagccgccccgtccgcagaaagcagacggggaagcctgctaccaaatgccgcgatcaacgtgtaaaaaggagggggagaggaaggggaaagagaggaggtgtacgcacaggtctcgagaaggggagcgacgtctctgcggcaagcaatcaactgcctaacagtgacgtcgctccctcgtcggtccagtcccgtggccttccctttcgtgccgacgaggtcgcaaagcgaccttccgagagcagcgagcagggtaaggcagagaggaggaaggaagggggaggatcaggagagcatggtggtcggcaggtaagaggaggcgagttcggctgggttgaaggaaggctctgcggcgaaatcaaggtcgcgtgaccaggccctagcaacgagcccacagcaacgacgacgacgagcccgacccgacctactcctcgcctgcccgacaccatctcgccacagctccagctcaacctgagggccctgtcatacaagcgagagcactcctagcgggaacagctaccacctgaacgtgcgcaccagccgagccagcccaggagaccgttcaactcgaccctccgaccggacgacgcaccaaccttcaccctcacgatctctctcgtctcgctcaactctcgtctcgatctgctcgactgttcgcctgcctataacagccagcatgtcatcatccggcctcgcctcgatcgccgacctcccgcagaaggagcgcctgccggcctacctcggcctcctcccctcgctctacgcctcgccgctcccagacctaccagcgctcatcgcgcacctcgtccaagacgcggccgtcccgctgctgatcggccggcaggttctcagtcaggtcgtcgatgacctcacgaagggccggctcgaggcggcaaagggcaaggcgaaagagggcgaggtccggcgcgaggtgctcgagaagacgctggccgcagtcggcacccacagcggcaactacgacgagcaggtgcgagctgccgacctgttgagcgcggtgccagaaattctcgattgacaggctctcctacgcttgcccgctttgcaggtctcggcactgaagctccagctggcagagctgcacgaggcagatgaggactggcacgaggcggccaaggtgctgatgggcgtcccgctcgactcgaacaacgcgtgcgtcgtctctcgtctcctatcaaaactctcggctctcgatcgctgatgtgctttgatgcgctcgacagcaagatgagcgagacggacaagctgaagcacctgatccacgtcgttcggctcctgatcgaggtcagtgcgccatcatgaaccctcgacccctgtgtgaggccagcagctgaccaacgaccattgtcctcccgtcaggtcggcgacgacggccaggctcagtcttacttccatcgggcgtcggctttgatccacaactgcgacgacgccgagacgaagctcgcctacaagctctgcaatgtacgtggcttgtctgcgccgattgactcgagcggcgtcagccatcgcccgtccgacctgactgtccctcctccctctctcgttgcaaggctcggctgctcgacttctcgcgcaagttcaacgaggctgcgctgcggtactttgagctcagctggaacacggacctcgccgaggaggatcggcagcagaccctgtgcgtctcatcgctcgcgcacgaaaacctggacgagcgctgacgtctttctccgcacgccaacagctctgcctcggtcgtctgttgcattttggccccggccggcccggcccggctccggatgctgtcgtcgctctaccgggacgaccgttcgccgtcgctcagctcgttcccgatcctctcaaagatgtttctcgaaaacgtcatccggccggccgaggtcgcagaattcgccagagagctccagccgcaccaggttgcgcggctgccgagcgtcaaggggctcgtcgtcgacgacagcgaggacgaggacgccagcggcgggatggcggtggacggcggtgagaagcggagcgagcggatcggaccagagacggtcctcgaccgggccgtcatggagcacaacctgctctcgtgctcaaaggtgcgccgtgccggctcgtctcctcgtgcgttattcgagctgacttgctgccctactgcaagctctacatcaacatctcgtttgccggcctcggcgcactgctcgaccttgccccggccggcgcagagttcctcgcccggcggatgatcgagcaggagcggcttcgcggctggatcgagtacgtcccttcctcgttcgagtccagacgaccgctcttgcctctctgactgctgacgatcgtctattgcatttgtgatgccggcctcacagccagatcgagaagctcatctggtttgaaaaccgcgttcgtcccacctcgatcgcatcgcagacaccggccctctagacccagctgacacctccactcgctttgcgctcgctcggcccgacaggacacggaggccgagggccagacgacggccggtggcttgggcgaggtcgagaagcggccgcttgactaccagggctcgagcttgacggagcgctgggatgctaacattggccggacggcggagaaggtacgttcctcgcgcgtcgagcgagcgacgaggggagccagctactcgcacacgacaagctgactcacatcttgccctgcggaccggccacctcccccctctttccgacgccctgccacccttctaggtcgaggcgatcgccaacctcatcaagacgcgcaacttgctcgtccctctcgttgaccggccggcccggccgccaagcacggtcgagatggcatgacggcggctgacgagagacgccggtggcgtgagactccctttttaacgatgtgcgatgacagtttgacttttgctatccttcgtgcctgctgctcagatggacgagaccggcgatagggtgacgagggcgactcgggcggggtgacaaagggcggcgggcgcggaaggtgcgagaggtgactgcgcggcagcgtccccttgcggcgagaagcccgaaaatttctaaagggctccgcggcgaacaagagggcgaaaagagaagaggcccgccctcggcccttcttcgcctcttcgccacccaccaccccggtcactctcgccatcttccccacccaatcctttcgacctcctcaagttcggtcggttcttccttctggcgaccgtctccctccttacagctggccgtcctcaactctcctcctccacatctccacctcctggctggcccagtcgccccatctcggtcgctccacgccaccggccggctcggttggtccgtctcagcagcagtcaacggtacgcctcctggcaaccgaaggatctcggcctcagcgcctctggcccgcagaaaacgtccccctcccgcagaacccccaacaagtatctctttttcgagtgcgaccttgggcggagcggcgggcagcaacaacgagtcgccctatcaatcgccactaccaccggaaccgcgcagagcaggaagggcctaaaaaaccgaggtgcacctcaaccgcttcagacggcgacgagcctccgggccccccaaaaagtatgtgttcatgtcaaccgcctggatgggccgttcggcgacggagaacgacgacaccggcccttggtcatctccccttgccgcgtcctttgccctctgcagccgtccgaccagtcatttggtccgacgcgcatggggcaggccggatatagacctcgggctcagtgttccgacctctcttgttgctgtctgtgcttccattccttgcacccgactttcgcaaaaaccctttggtcgcaaccgtcctgaacatccgagtgtgtctcccgtctccccctcgcttcccgccccgcacgaactcaagaagcgaagaagaaggaagcgccttgtctccccctcgagccacggcccttcccacccctttttcctttccactcctcgtccgcgggaagaagcgaggggtgacttcgtgttgcccttccttccctctgccaaccccggtggggtcgtcgatgggtccaggctccgtttctgccctcctcttccccaaccacctttatctgccggagggccctttcttcgtcaagagctaggcctctctttcttcggtgccccgcatacacctggtgtagtagtaaaaaaaactgtccctcggcctcgtcgttgcgtcttcttttctcacttctcgcgcggcatcacgctggctccgcccgggtcgagttcgctcgtctttggtcgaccagtgtccaagaggagccgtcgagcgcctcggtcggtgctggaggggaggttgcacctcgtccctgcccgccgtcgaacgctcgacgagcgcgagtctttcggggctcgcactccctcttgctcgggtcctttcttcgatccgacaccttcactggtcgtctggctcgagagggctcgaggggcggttggagggccctacacagggttccccttccgcccaccccccttttttctcgacgctcttccctgctgtcctcagctttgctggaggccaggggtcgtcgcgatgatgttctctccctctgccgttcttctttgactcgttgctcatagaccgcatgcactccaccccaccttttgttgacgagccttcgtagcaagcaggcaagccgagccaagaaagtcgcgcaatctatagcgcgccctcgagccctcggctctcgacctcgctcgcgaccctccgctcgagccaggccccccactctgcacaccttcccgccccgagccggactacctccatcatctcgcccggggcgagcgcgacgccgcccgtctttgagagcatgttgagctcggccgagtcggcgtgggccgaggtcgaggtcgacgagagcgagagggtgaggagcgagggcgcgagcaggagctcagagagcgaggggtcgaggatcggcgggagactggcggccgagcgtaagaagcgggcgagaaacaaggaccttgtcagcagagcgttttaatcggatgaataagctgaaagggattgtaagacgcacccttcaaagtaagcaaacgtgatgcagagcggaacgtgatgcagtgagagcgggatcggcggccgttggctcggcgggaactacaagagggttgcagcagaaggttagttcgagccagcacgccgtcttctcgaccgatagccagctatcctgagagggagacataccatctcgacctcgccgcccgtcacctcccattcccaccgacggaagccgcgcaggccggccatggccgccatgacggcgcagtcgagcaagttgccgtcgtccgacagcggatggagcgtaatcttgagatgcagcacctacgcaggagggaagagcggagcgtcaatgactgcggtcggtcgtgcgaagctagcgcactcgagactgagcgaaggggtcgtaccttctcgccggcgacgatgcacagcgactcgcggtcgatggcatcggctttccggatcgcccgctcaagcagtaacgacaagcgcgtctcctcctccgacgacctgcgagccgatagagacgcacgcagtgcacgagaggacgcatgggcgacgaccgggtatcgggagcacatgaagcagagcaccaaggtgtcagtcctcctgttcgcttcaggtctacagaacagcagcgacacgcaccgcatcgtctcgaacgaggtcgaggccatcggcgagagctcaaagtggacggtgaccatgccttcgtacggccggtctgatctcggccggacgactgacgacgacacccgggcgaagacgctgggggcaggaggaggggaagctcgtcagcctcgctggtactaagctctggcatgccctgccgtccctctgccgagccggtacgcacctcgtcttgccaagccggcattcgatgccgccgtcctcgccgccgacccactcgagcgcccagggccgggcctcgtcgagcctgcgcccgtcagtgcggacgccagccttgatggccgcgagcgtaaagtcacgctgtagatgcgacggttccggttctttgggcatcgttgtcctagctctttgccacgggagagaaagaggagggtcgagagatcgggagggagagcgaggtgctgttggtgggctgaaagacctgcctgcggagcgtcgtcgttcgggacgcgcggcaggcgctcgttcgctcgccttcgacctcgaccctagcaccgccgccgcctcgtccttccctctcctttggcctctctcttgatgtctggtcggctgctgtcgtcctcgggcgcctcatcgtgcgtgctgctcttccggtacccgttctgagcaacaggcgggccgtcgctaatcgtcctcgtactccgctcacaggtggagagcccgcgccgccgcacgcccgtacagccccgcggccggccggtcggtcgtcgtccttgggtcagacgtccttcgaccttgctcagtgttgtgcagcactggctggtcgacaggtcgtctgccagctgctagcggttcgctccggtcggtgtcgaggcacccgtcgccggctcgcaggtcgctgcaccggacggtcgtccgacctgcggagctcggctcgcctcagccgccgttgtcttcaacgaccgccgtctcgtcgtccaccacaccagcaagcccagcgccacagcttccgtcgctcggcctgccgccggttgacatgccgcccatctacccggactcgccagattatgatgcccggaggtttacctctgtcccacagccgctgcctcctgcgggcggctcgacgcccgcccgcgctctcccaccgtcacatccggcctcgccggcctacctcgaggcgacaacgtttcagcccgtccggcgcgactcctttggccccgtcatccctctcaggccgacaccgccgccgcgcgacatgccgccgacgccgccgacctacaccggcctctggaagatgtacttcctcgcaaaggagtacttccgcttcctttatggcggcgtcaaagagagctactctgagtggcgcgagaagagtcgcgtccgccgggccatgatccaggaaggccaccagatgacgtatcacgacctcgttctcttccggcgcgtcaagagcaacaaccgccggtgcgtgccctcgacgtgctcctccgcacgaccgtgctatgcgctgatctctcgccgctggcccattccaggatgctgcccttcctgttcctcgctctgacgatcgaggagctcattccgctcctaatcattttgtgcgtcggctgctctgagttgtttcgagctgcgcttgagccgcccgcctgaccgtctcctgttcttcctcaaagcgccccgcaattcgtgccgacgaccggactcctcccctcgcaggccaagaagatgcagcgcgacctcgaggacaagctcgtccgacaccgatcggccgtctacgagcgactgacgcggccgggcggcgtcaacccggaggacggcacgcctgtcttccccggcggctggcgcggggatggctttctcgagtggaagagcgaagagatcaaggccgtcctgaagtacgcgcggccgaaccttgtcctttcttgcgccgttgcagatcctaatctgctgtcttcttgcagggtcttttcgtggccgaaccgcgagccgacacggagcttcatcgaggaccacgcgcgaaacgtcgtctcgtacgtcctgtgcccgaataaaattaagaaggcccagtcttaccttgatcgctatcgttcgcagcttcctggaagaggacgaccgctacttgagcgatcggccgccagccgagggcttcaccgctgacgagttccggcgcatcctctctgcccgtggcttgtgcgtcgaattgcagcttcagcttgagctttggcacaaggctgacccactctcaccttccgtcccaggctctcggtcgacatgcctgaggaggacctgccggccaagctcgacgcttacctgacggcctaccgtgcgacgcccgcctttcacccgttcgagtacgtcttccgggacatcctcgccacgcagccagacgctgcggcggcgcttgccgagcgcgatgccgtcaaggcgcgcgcagaggaggccgaaaaggctgccaacggcggctacagcggctggaaggcgattgcccggaaggccttcatcgagagcgacccgctgccgacagtcgaaaaagagcaggtcaagccgacggacccgagcttgagccgtacgttcctgcttcgcctcgcagcttatgcagtcgactcggttctgactgcgaccacgcgtcgctgaccttaacactcctagccgtccactccctacccaaggcgaccctctcgccgtctctctcctcgcggttgtcaaaaccggacgccacggtcgagtctacaccttcatcccagtcccgttcggtgcccaatccttccgcgcctggcccgtcgtacccgaccgatccgaccgctccgcctcgctaccagctgaccgagggcccgaagccgccgcgcccatctggcgggcggccgggctcgctctcgaagagggcgcggacggcaaagttggatgaaggcgtatgagatgccttcccagaggaactggtgtctagactcgggggacgtacgtgcattaatgtgcgagccctttcgagacagagtggtgaagcaagcaggcgtcgattgcgagtggaggatatttaaaagtggaggcaacgggagtccctgacagtcagaagactggctctctatatagatcatgaggcccgctggagccgccttttggacgagcccgacggtcgcagaaacgcgattaacacagacgaccttcggcaccgtcgggttcccacgtgcctggcccgcagcacgccggcgcgggcgagatggcctccgagtcctccgcctctctatcagctcccccttagtcgacgaccgacgcctaaaggctcaacgacgacctatacccttgcggcgacctgtcgaggtcggagggatgacggacgagctctctagcgctgggctgcaagccagggagaaataaattaaagggtcttccttccccctggcttgcagcccagcgctagagagctcgtccgtcatccctccgacctcgacaggtcgccgccttgatcaagcaagcccctcctaatggctagcttgcgcgcgctcgtcccgacgctgctcgcccggccggtccggtcagccgcctggcaggtccaggccgtcagcctcctccgttcggccagcagcagtagcagcagcagcgaccgccgaccaacgagctctttctcacctcgactctcggccgctgtcctagcccgtcggccgaagccgctcatcgcagctgccgctacaccgctcgttgcgccttcgctgcccgacccgacgccagcagaggacgcgtcggccctagcggccggctgggtcgactcgaccgctgctgccgcctccgacctcgccgccgacgcaaccgcgtctgcggccgtcgatggaggggccgacttgattggctcggtcgccgcccacctcctgcttgatcacccttggccgttctcctcgcccctgccgccgtacatgacgaccatcatcctttcggccgtcgtcctccgcctggccgttaccctgccggtgacgctctgggcccgccggcgcgagacgcgcctcaaggaggttgccgtgcccgagctcgctaggttcaggaacgaagcgcgcgaggggctcgtcgacggctgtcggcgcgagggctacagccacaaggagtacgacgctttgctcaaggaacgggtgcgtggcgcttgaaagagcgcgagggaaaccgtctcactcgctgacgagcgcttctcttttcttacgatccccccccccccctccccgctcgccagtgcaagcaagccaacaaggccatcatcgacaagcacgcagccgcgccgctgccgacggtcgttgtcccggcgctcgtccagctcccgctcttcttcggcctcgtctacatcctccgcgccgcctcttcctcgccgatttcgccgctcgcacacgagctcctcccgatcctcggcacgccgctgctcgagccggacgcgaccggcgcgctgcccatcatggtcggcctcctcttgtggaccaacacggagctcatcgcccgggcccgagcgaagaaggacgagctctacccgttcgagtcggaggccgaacggcagccgcttgttgagacggtcgagattcccgacgggaagggcggctttgttccgaccgagctcgaaaccaaggctggctggctcgaccgctggaagggtaacgtcttcaagggtctcggcatcaccttcgcggccatctcgattttcgcgccctcggttggtcccctctcccccctccccctgtttgttgtgagcgtgtcatcgactgacgccgatgcccctgctgctcgatccctccagtgcatgcaagtctacttcctcaccacgtacggcttcaccctcatccagacgctcctgatcgaccgggccgaccgagcccggctcctcgcgcttcgcgcccggctcgcccaacacccgcccgaggcgtacggcgtgcgcgcggccgacctcccgaggagcatgacgcacgtcccgcccctcctacccggctcgatcaagcagacgtttgggaaggcgccaccggttgcgcggctggcgtttaaggttgagccggtcaagctggcgtttgacgtcaagacgggcgtcaacctgccgcttagaaacgtcagccagcgggtgagggacgcggcaaaggagaaggcagacgcggaggcggtggtcaagcagatcgaggccgcggagctctctgtccggcgcaagcagaggggccacagcagttgagctccccctttggggacgcaacgcttcttctcagccaatccgatcacgacccgggtaccgcttcggcctcgctcaatccgaggtgcggctagacatcgtgtgagggctcttccggccgcccgacattcggccctcggtcgtcagccgtgtgcagagcaactcttgcggcgaccgctcttgccctaccggaccctccctctcgccggtaagtcctccgcccccgtctcttgccagcgtctcccttccccctccccctctccctcctcaccgccttcagcccgcgcgctcgcactccgaatgacgaacctccagagaagtcagacatccaggacccccgcccccaccccggcccgcacccgccgagagcccactaagcctcgctcgcggccgtcgccgggcggccttcccttctttctctccgagggagggagggaggctgtcgaccctgggacattgagggggaccgcaagatgacgccatgatctaatccgacactttttgctgcttgccggtggctctttcttcctccccgcttgtcgtccttgtcgtttgctcgctgcctgcctcgatcagaccagtcgctgacgcccttttgactccgcgtttctcacagcaacatctgcgccggccggtgcaagagtcggctcgcgaggccagcgccgaggctgactggtttgcgatgggaccgtgctgctcgtccaccctcagcgagggtcagccccagacgcatgccgcctcgatagaatgcagctcccttcctgagacctccctcgtgcccggtagatccgatcgggagcctttaatgatgcctcttgcgtcggtgaaggatctagaccaaacgattcatgctctcgcagtccccatgcccaccgacggctcgccccctccctcgcataaagcagaggggccacttcctgcctttcctccttcacaggtcgacgcgaccggaaggtctggaaagccgctttacttgccctgcgagacgtactcggacgtgctcgagacgcgggcggccgacttggtcttgtcctgggcgaggtagaaggcgtcgcgctggtggactggcgagaccgagggtggatgtggtgagggcgtcagctgctgaaggtgaaacgggcagcggattgagcgtgatctgcagaggaggtcgggtaagcgggccagggggtcgccgtcactgccggacgaaggcagggtctggcatgccagtgtggttcgaccaggctgcaagtccctgcatcgcgcacggtcggtcaaagctggccaggcgggcagcctggatatgccgacggctcgagtaacctcgccactctctcgctcgcccccagccaatctcctccctggcttttctcagtgacgccagcctcgaaaggcggagcgctgagacagggagcggcgagagagcacgtatgatggatgtgcgtcgttccccggatcgaggacgttgtcgtcaaagagaggacgcactcgacgggatgtggaccgagtacctggagcaagggccgagaggcaggtcagccggcgatcctgggagggcacacacactcgacctgcgtcgaaggcccaatcgagacggcgactcagaaggaggagcactcaccaccaggcgtaggcgcacgcagttccgaggccgagccttacaagccgacggggggaggggagcggtcgacggtcagtcggctgcgtgactcgagcgtcaggcggccgacaccctcgtcctcctggacaaaaagccggccgctggccaggacggccagaacaacagaagaaatacgcacgacatggtgatgtcgaacgcgatcttgcgccgcctgggagggtcaagagtcggacgtgacgcaaagccaggtcgagacgagccgaagcacaagcaggcgcggggttgcaggacggagagtcagctcgctggcaagcacgggtgggacctaagagatgcgcgaccgggaggcgcttcagctcgggacggccgctcgccgccgacctctagcaacggcaagggggggtagggaaggcagggccgacaaagccggccgtcgggcttgggtctcacgcccgagctgactggaggctgctcctcgaaggaaggggagggagttgcgcctactgacagggagccggcgatgggagcaacacggtggacgacggcggacatggctgaggatgggcaggaaggagacgggaaggttggagagagagagagagtaggctggtagaggagagaggagggatgaggggagcccgggcgaagcgtgcggaagggcgcccatacaggtcgccgggtctgatgcatcatgagggaccagccgcccggaaaggggttcacgcgcgtcgcgccgactctcgccctcatcaccctcggccgaccactcactcacggctctcccttctgaaggccaataaggagcgacaagcagcggctcaggatcctcagcttttgctatctgccttctgtctgcccggtcaaaagcccaatgggcctgcccgctctcgaacgcgagcccgccgtcgacgcgtccttcgcctcctgagctccttgagaactacgccccgaactcgacgacgacccgcctcgcccatcgtccgcccgctcgccatggcgctcatacctctcggagcagccggcttgacagctcacgagccgtccgccatcgccctcccgccactcatctcgcaacacctcccgccgctcggctcgcagcggccgccagcagaagcagccggcgctggcgccaacccgacccaattcccgtcggcagacccaatcttccgggcaggcatcaaccagatctcgcatcctcctgcagccgtctcgcccgcgcgctaccaaacggactcgcgcctgctcctcgagcgcttctacgcactctgggtcgacggcctgacggccgcgagcttgcgcgagtcggaccgctactgggaggccgtttacgtcgtctcgctctcatcgatgtttgtctcgcgcctccacgagctcgccgccaaggaccggacgccgacgcttggctcgttagacggctttgcctggcttgtcggtcgcgccctcaccttccgtgccaaggtcgtctgctgggccgccgctgcccgcgcagacgacggcgagctcggcgagcgctggaccgagctcgccgacgaggccgagggcctggccgttcgtgtcctcgagctcgtcggtcgaggcgacaagcgtgatggccgcggtggcctccgcataggcgacggtggcgaggcgctccgtgaccggctttgggcgcaggtcgtcgacgcgacgctcggccacacgcgaggtccgttgcttccgcctcttgccgcacccgccagacaagcgtccttctgacacgcgcctccagatctccttcccctgcctccaccgggcccgtgtgacccgcgtacggtgatcctattcggctcgatcgccgcggcgcctgacgctgcgcctcacggctcggaccccttcagcaacggcgcggccggtggtggccccggcggacctttcaagacttcaatcccggcgttcgtgatcgcgagccaagcccagtcgcatgcgctcctcctcaccctcatctccttccttttggcgcttctcgcgcatccgagcaaggcgagcgactcgacgacctgcactggcagcccggccgcggtggcggagactttaccggccgcccagcacttcctttggcttgctcagagccggaccgaaaccgtccagctcttgctcaccgcctggaacgacacggcgtccgcctcggtcgcgccgacggcgacgtctgcccgggctgcgacgacccatatctatattcggctcgcacgggccatcggtctgaatcagctcggcgtctggacgaaagtcctcgagctgatcaagggccgctgtaaggaggatctcgaggacggccacatggacgtcgacggcgccgacgacggcccttcggacaggacacggcgtctcagggctgaggtcgatcgcgagctcaacgctgcgcttcgtgtcatccggctcggcaaagaccagcaggccgactgcatcaacggcctgagcgacctgacgtccatcgttcgcttcctcgagctcggcgagcgcgactcggacctcgccgtgagtgacggtggccgtggcttttgggtctgagcgaacgcgctgacctttatgacctcttaccttagaatgcctgcctctcggtcctctcgaccttgccgtcgtcccttcccgcgctgcggccgatcgcatcgttgttcgcgtccaactcgtcggcggcggcggtggcctctggcctcctcaacggccaagacggcacgccgaccaagctgctgccacagcagcgtaagcggaagcgcgagcacgaaggctgggtatggggccgtcttaccgtcagccatctcgagtccgcttttggcgtccagaccggcctctcgctcgagggcggccaagagggcaaaaagctgcttctcattgacctcaagaaccggatcaaggactgccggctgacgttcgtcgccttgacgtctgctcatttgactcgactgcagcagaagctgaccttgtagttttggcgactcgctgctcaggatctcggacggccgtgaagccgagcagaacttctgccggcacctgccgatgaccttgctcgccctctgcggcgccctgcacacgttaccgcccccgctcgcctcatcgacgccgacccggaccgagctgagggagctgacggccaacctgcggtcaatccccattgcggtcggctacgcgctcgcctcgctcggccagaacgtcgcgttgccgacaaaggcccgagtgacggtcctcgacgttctcgccacgacgctcggcaagctctatgtcacgggagctggagagccgcttaaggcggtcgagctccacatggaaaaggcgatcgctcgcgggctcgagagcacggagcggagcatccgcatggcagctaggtcggtgcccgactctctgcctcgcctcgcccgtcagctctgctcacttgtagctcgcacacacagccgctgtatactcgcctttttcacgtatcatgcggcgtcgcccatctttgccgccaagaccgagggcgttttcgacacgctctgtcgcgtgctcggccacggctcggcgccctcgcgcgagacggccctgacgacggtcggtgtcctcggcaaggcgttaggcgacgagacgctcatgcgccgaatcggtagccagctcgtcgtccaacttggcgagtcggatccctggatgaagagcctggcgcacacgacggtgagtcgggcctgcagccattcaacccgcctcagaaagctgaccttgctcggcccttcgctctcgaaagatcctctcggtcgtcgcccatcacagcaagacgccgtacaagttcttctacccgcactttgcgtcgatcgcgatccggctcgtcgactcgctcctgctggcgccgtcgatgctctccgactttgtcacgctcatccacgagaccgaggagaacttcctggcgacgacgctcgcccacacgacgccgcatctcgtcctacaccggcggcaggacatcctgtttgcgctcgcccgcaaggtccgcaaagaggtgcccgagatcttgctcgagaatctgctcggcatcctctaccacatcctcgtccaggaggatgaactcaccgagcgcggattcgcctttatgctcaaggcgctcgcgacgagcatggtcgaccgccagggccggaacgaggatgtgcgcgcaggcgagctcttgcggatcgccgaaccggtcaagctgctctacatgctgattgtcgacctcggcgacgaggatccggcgctcgttaagcgggtgcgtcgcttgtgcaagtttacaccgcccactcccgtgatcgactgacgccttgcctcttgatctgcaggctgaggcggcgctcagtaaggccgaggccaagttcaaagaggtccagccgagcagctcgctcgacctcggcgaattcttgaagccttacatgctcggcatcatctccaacatcaacgaggtcctccaggacgtccagggccgcaagtcggtccacgacaagatgcgcgtcatccggagcctcggtgcactcatgcgcaaggtcggggacacgatggccaccttctcgcagcaggtgcggcgtccccttctcgcagacggcaccggccggcctgcttgtgctgactactgctccccttccgtccctaagatcatggttacgctccagggcaatctcaacaaggagccgcttcggctcgtcacgctcgagacctggcacacgttcctctcggtccttcgcttcaaggacatcgtgccccacatcggcccttcgacggctgcctttgtcacggcctggacgagcttctcgccggccgagcgggcgctcgcggtcgagatcatccactactgcgtggtcgagaatgccgaatttaccggcccggtcctcgacgacattgtcagcctcgacaacattacggagcttaagctggcggcggccaagctccgcgaaaagcgcaaggactggcacgacattgaccacatccgcaacgtcatccgccgggcggccgacgaaaacgtgacgatcagcatccgcgcgctcgacgagctccgcggcctccttctcaagcgcgaccagatcacgcagctcgcctcgggcgacgctttcgacccggtcgtcggcgccctcgttggcatcctcgtccagtcggccgcgcgcgacggcgacaacgtgaccgacctgcgcgacgtcagcctcgactgcctcggcatcattggcgcgctcgacccggaccgcttcagcctccgagccgaggatgcgtcgatgacgatcaaggacaatctcgagagtctcgaggaggcccaggcatttgccgtccacctgctcgtcgacctgattgtcggcgccttcaaggcgacgaacgacacgcgctaccaggagaaccttgcgtacgcgatccaggagctcagccgcttctgcagcttcagcaaggacctgatcgacacatcgggcgccaaggccgggccggtcgccgtcaagacgcgcgagcgctggaagaagatccccgctcaaaagcaggtgacgatcgcagacatgctcgagacaaagtatgtcctccggccggtgcccgagaagacgtttgagcggccgatctacggctcgtgcccgacgtaccgcgagtggatccagaagtggacgtcggacctcatcccccggacgtccgagggccacgctcgtcagatctttgacatctttcgcgtcgtcatcaagagctcagacgttcacatcgcacggcacctcctgccgcatctcgtcctcaacgtcctcctctcgggcgacgcccaggcccgggccgacatcagtgccgagatgcgggccgttctcgtcgaccaggttgacccgcagggaaccttcccagccgaccgccgcttgctgagcgcccaggtacgtccacctgtgtctcagcagcaccggtcgctctcgagctgacgagcatctcccttccctcgctccgcagaccgtctttgacctgatggaccacatcagcaagtggctccggcaccagcggatggacatcacgcgtcggcgcaaggaggcccagaaggccggcaacaccaacatgtcggccctcgacgaggccgcgcgcaagctcgcgagcgtcgagggcgtcatctcaagcatcgagaccaagctaacggcccaggcggcgctccaatgccgggcgtatgcccgctcgctcctcaactttgagcagcgcatcgtcgccctccggcactctggcgtcaaagagtcggcggccgagtgccaggaccattttgagcacctccatcagatctacgcgagcctcgacgaaccagacggcatggagggtatctcgtccaaggtgctcgtgccctcgctcgagcaccagatccgcgagcacgagagcactggcaagtggacgtcggcccagagctgctgggaggtccaggttcaagactcgcccgacgacctcaacctccatctcggcctcctccgctgcctgcgcaatctcggtcactatggtgcgtgcgacgtccttctactgctaaggtcgtcgctcctgactgacagttctctgacttcccatccagacacgctccggacgcacatccagggcctcgtcagcctccggccagagtgggacgtcgcgctgtccagcttccgtgtcgagggcgcctggatcgtcggcgactggcaggcggtcgaagacatcctcgccggcgccggtgcgggggccacaagtcccgaaattgccatcgccaaggttcttgtcgagatccgagctggcggcgctcggctacctgacgcactgcgagcggcccggctcgagctcggccggcctctcaacgccgctggccgccactcataccagcggtcgtacgactcggtcgtccagctccacatgctgcacgagctcgagctcattgcgacgtcgtcgctccccgagctcgccaagatcgacgccggcgtcaacaaggcggtcgtcgccaaggagcgcgtcatccatatgaagtcggcactcgatcagcggctgggccggatcctgccttcgttccgtgcccaggagccgatcctgagcatgcgccggacggcctttgacctctggtccgtcccctcttggtcgctcgcccgtcctagtttcccgcaattgacgcgctcacccttcgcccacagtgcccagtcgccgaccgagggcgtcgacagccggaaggagattggtcaggcctggctgctgagctccaagattgcgcgcaaggccggtcatcaccagaccgcctatagtgccgtcctccaggcccgacagtacgcgacgccgtttacgtttgtccaggacgcaaagcttctctactcaaccggccagaacctccgcgcgcttcaagagctccaaaacagcctcaatccgatcctcactgaccaatcgcttcagggacccgacctggccaaggcgagttccctcggcctccaccctctgtcatgcgtctggaggctgacgtctgctgccaccgccgtcccttgcaggctaccctgctcaaggcacgctggacgcgagataccgagcgctttgatcacaacgaggtcatcgccggcttcaagcgggcgatctctctcgaccaagggtaaggttttcccggccgggcgaacgtcgctggcggtcaggatcgacgggtaactgacgccacagtccttgtttgcagctgggagtcgccctactaccacctcggccattactacgactgtgcaaccggcgaagcgtacgtctctgctgcctctcttcctgcgtgctgcacccggccaagggctgacctaccctcgggcgcgcaggctctactcgatgacggctgcgctcaagacggtcgaaaattacgcgcgcgccctccgctacgggacaaaatacatttatcggacgatgccgcggatgctgaccatctggatggactgtgccgagcggcctgacctcgttaagaccgagctcgtcaagaccgacccaaaggcagcagagtgcgttctcgaccgctgcagcccctcatcttgactgatttgcctgctgacgaccgggtcgactgtttccgcagcgcattgaccggcgacgagaagattctcgccagcatgacatccaccatcagccggagcatcgagaaactgccgacctaccagtggctgacggccttcccgcaggtcgtctcgcggatcggtcacgccgacgccgccacctaccaggttctctcgcgcatcatcatcagcgtcgctcagaattacccgctccagtcgatctggtcgatggtctcggtctcgcaatccaagaaggaggaccggcttctccgctgcaaactcatctttaaaaaggtgagcgctcgcattgacgtccgccgagttacagcagccccgggagctgacgtgcagaccctctcgctcaaccagctcggcggcaagacgaccaaagaggtcggcgacctctcagtcttcatcgccaaggcgctagccatgacaaaggagcttctccggctcgcaaagcacgaggtcccgaaaaacagctcgctcttcagcatggctcgctactttccgctgctcaagtcgctcgcgccatcgccgctcctgatccctctccaggaggccctgaccgtctcgctcccgtcgtcggccgcggcggtcaagcggcacgagcacaacccgttcccggtgtgcaccgtccgcttcaaaggtgcgacaatcgtcctcggccttggatggattgtccgcgagctcacaatgcaacacttctcaggctttgccgacgacgtcgacgtcatgagctcgctcgtccggccaaagaagattaccgttctgggcgacgatggcaacctctacagctttctctgcaagcccaacgacgacctgcgcaaggacgcccgactcatggacttcaacgccatgatcaacaagctgctcaagaaggactcagactcgcggcggcgcaacctctgtgcgtcccgcagggccgataatgccgacaggctgaggtggctgactcgcgtgctttgcccggcccgacagacatccggacgtacgctgtcaccccgctcaacgatgagtgtggcctctgccagtgggtcaacaacacaattccgctccgcaacatccttcagaaggtctacagcagcaagggcattcagatctacgtgcgtccctcttgatcagcgccgttctgccgctgcactctaagctgacgtcggcctgtgggttgctgcagggccccgaggtcgtcgagacgtaccgcaagtggccaacgctgagcgacccagacgtcgctcacgactttacacagcggctcttacccaagtgcgtcctctctcgtcgcttagcgttgctgccgccgctgacgtctctccctcatgctccaggttcccgcccgtcttccacgagtggttcctcgagacttttcccgagccgagcgcctggctgagcgcgcggctgagctacgcgcggacgtacgccgtcatgtcgatggtcggcttcgtcctcgggtacgttcttgcccagctcctgacctgacaatctcactccgcaagctgacgaccgctttcgtcttcgtcccgcgcgcagactcggcgatcggcacggcgaaaataccctctacgacgccaactcgggcgatgccgtccatgtcgacctcaactgccttttcgagaagggccggacgtttgaagtcaaggagcgcgtccctttccggctgacacagaatcaggtcgatggctttggcatcaccggcgtcgagggtcagtcggccctccctaccgttgcagctgccgactacacgtcctgacccgcttatccttgcctcgttgcaggcgtctaccgcaacgcctgcgaggtgacaatgcggatcctgcgcgagaacaaggactcgctgatgagcgtcctcgaggccttcatccacgacccgctggtcgagtgggagaatgacaagcgcaagctagtgcgtccggcagcccttctttctactccgtcttccgaccgctgacgtctttcgggattgcgacccccttccaggacaaccaacggcgggccaagtcgcgtaccaagggccaggatgccgaggacacgtcgatcaacgcgctggcgcgcaaggcgctcgtcccgatcgagcgcaagctgcggggcgtccaagccggctacgttgccccgaatcagccggccccgaccaaggagatcaccgtcagcaaccaggtcgaggccctcatccaggaggcgacgagtcccgtcaacctcgcccggatgtacatcggctggggcgcctacctctaggcggcggcggcggccgggcaagggggccttaatttcaatgacctctgcataccagagagctcgcggacgggcgactgctctgtctgagcgcgcgagccaactttcccatctgcgacagtagtcggaggtcgtcaaggggattcaatcgtgtcacaacgcgtaggggcaaggcggggagatgaaagggggaagatgagggcctcgcgtttttcaggccgactcgtcttgctcggaggacgacatcgagccgtcctcgggcaccgtgccctcgccgccaatgacggcccgctcacgctcctcgcgccggaggtgaacgccctggtgccgtgagagctggtccggccgggcaaagcgcttgctgcagccggggtacttgcagacgaatggcttttcgcccgtgtgggtccggatctgcaacagaagcagcgggcgagttggatcagcaagggcggctcagccaaaccggacagacgacgacggccgacgacgtacgtgcttattgaggttggaggcctcggtgaagcatcgcgcgcagtgcggacactggaacggcttgacgtcgtcatgcgtgcgtctgtggatcgcgagcgagctcgcgagcgggaaggccttggcgcagccgtcatggtcgcagacgtgcggctctgcaggaaggcagttcaaaaaggagtcagcgacttgccagaaggacagagtgaagcagagcgcactgtcggtcgagtgccggcggacgtgctgctgaagggtcgccgcttcggaaaaggtctggctgcagagcgggcagacgaacggcttgtggccggtgtgcgactggaggtggcgcataatcttctgcttgctcttgaagacggctgtcggcggggaggtcaaaagctggcggtcagtcgggtataagtgaagcaagctcagccgaagggctcacggccgtgcaaggcccggtcgcagccatcccagccgcacgagtactggttcttgccgctgccgacgtggaccttgtcgaggtggtcggttaacgctgccgtgtcgtcaaagacgagtctgcagcctggccaaccgcaggcatggacgctcggtgccggcgcgccatcgaccggcgagcccccctgactctgggcgacctcacccatcgacgaaatcgacgaccggcccgagcggtgtttgatcgatgggagcaggtgtcgactgtgggcgtgcgagtggttgtgcttgtggtggctgtgcggcaggtggtgaacgtgcaagtggttgccgcttgctgacgtcgatgcaggcgaagggacgtccgacgtcgtaggtgcgcggtacgggtgatgccgaccggcgttccgacccggctgggaggtcgacgccgacgagcccggtcgggtcgagctgcccgacggcgagtcgatcgagcagtggtgctgctggtgctgatgctggtgctgctgaagccctggcggcggctgcatggcaaagaccgactctgtagagccatggtgcgagtgggcgtggccgtgttggtgttgggggtgagcatgggcgtgcggtgagagttgcgtgtggaggtgggcgtgatggacgtgctgcggcacgtagaagaactggtgctgctgcggctggtggagcggcgagtactggtggatgttgtggtggtggtggagaccgctgagcgggtggtggtgcatgtgattgtgagcgtggagcatgccggcagtgaaggcgccgctgtcgaggctcgttggcgtccctgcggtcgaggctgagctgtgcggcgtcgaggccgaccactcgccggccgcgagaccagcgccgccaccggctgagaagacggagctcgcgtcgtcgccgagcaggcctggagtgacggcgatagctggcgtcgtggtgtcgatctgcagcgactggggcggaaatgcgttgaggccgccgggcccgttgccggcgaggtgatcctccatcaggtgcttgagaaagaggttggtcggcgagagcgtcgccgtctcggtcgtcatcgagacatcctggctcgagccggtcggagcagacggcaggaggtcggcgagcgtgaatgtgtgcggctggccgccccactggcactggacgctgaacgggtcgggaggaggcagctgggcagagggctgcacgccgatcggctgggccgacatgggagcaggctggtcttggaccgagctttggcagaagaagtcgaggatgtcttgcgtcgcctttgcgtcgtcggtcgcctgctgctgctgccgttgctgttgctgcgccatttgctgagcagccgcgccctggaagagttgctgggcctggatggcgccggcattgaacggctggtcgatgccgagggcgttcggaaagggaatgtgcgacgccgtcgtccgaaagtggtcgagcaggaggtcgacgttcgggaagacctcttcgcagcccgtccagaggcagggaacctcgccagctcgaggtgccgatgacggagccgggatcgacagctgcggtgacggatggaaggctggggccgaaaaaccgtgcgagccggtggcgtacgaggtgcgagaaggctgaatcggcgggccggggccgacgacccttggtaccgcctggtccttgatggccgcatcgatgagcgcctggaaggccgacagcggagcctgctgtgaggtagagtcgctcgcaaggccgcaatacgggacagtgttggccggaccggcggcgagaggagccgtcgggccgacgtcagcaaactggggcggacagcagtcgagctggcaatcacgaggaagagcaggtttgtcagcgacgacctcagccaacagtgggacagaaggagacgacggaccagctggtcaaagtcgccaaagagcggtggtgcgtcctcacacgcccacgagtgctcgtgcccgcagcagtcgaggacgtcgcttgcgaccggctggccggcgccgtcgagcagacagtcggcgtggtcggcagcgcactcgaccgcgccacactcgtcgtcgcagtcttcgtcaaagcaagggacgtcggccgcgctcgcgcattcgggcgacgagcacgaaacggcgacgccgagctgctcgcactgcgcgagctcgcaggtcgactcgtctgcgcaagggcctggcggcaggcgacaatcggggcactcgaggcagccgtcggcgacctcgcagccggtcacggacgagatgggccggcagccgctcgacagcgggagaccacagcaagcaaagacggccgacgggctgttggcgtccgcgcagttggcgtcgctgcagccgtcaccggcggtcgaggtcggctgggacgagccagaggacgaggagaccgacgacggcgaggtccggcggcctgcggacggagcggcgagtgtaggccgcgaggaagccggccggatggcatctcttgtcgaaggcttcgacgacgggccgcagtcggccctcggcggtgagcgcgagggctcgccgtggtggtcctggtcgcagcagtaaacgaggacctggcctcgcgccggctgtgacggactgcgtacggacgccataggcctactgtctctcatagcggaaaggaagggagaagggaggaggagacggtcggcggctggccgatgaacgagttcgggccagtcgagcgcacacgcagggcccggcggacgagcgacggaagcgaggacgggccagtcgcgagcacgtcggccagccggccggcccgatgcagggtcaaatcaggctcgagagggtcgtccccgctagtgcgacaaagggctcaccttctgcttgacctcgtaccatcgacgagagcggcgctcggcggcgagctgtgaacgagtggcagctgctcatggccgcggagggagcgagccttcgcgtgggctgaagcgagaaggccgacagagaagcatgttgtcacggcccaggggaccctttcttgagcactttcttcgacctgactctgttctgacttgacagcgacgccgcctccgcttgcgagctgctcttagtactcctgtcgttgcgagagtgacagcaggaggcagcaggctcctctgttcggcggcttcgggcgaggtcggcccgctgcggccgcctcttcgcgcgcgctcgggctgtgacgacgcctgcgagacctgcccgagatccttctctctccatcaacaaccgctcttcctgtccccgtctcccctcttccgctcgtcatcatgcttcgatctgtccgccaggtccgctccttcccgtcgctccggcaggcgaccgcctaccaggcgtcggtaagcccacagctccagcagcagcgctcgctcgcgtcgaccgtcctccttacgagctggacccaggcccgcgtacccgacctcaaggaggagctcaagaagcgcggcctctcgacgtgcgtcccttatgggctgccaatctcgaacaggcagactgctgagactgacacgaccgtcttacatctctcgcctgcagcgccggcaagaaggctgagctcgttggccggctcacgcaacacgagagcgcccagtccaagatgccctcgacccgggccgcctcgaccaaggctaccgaggagaagcccgtccggctcgccgacagcgagatcgaggccatcaccggcgacgagatctcggccgtcaacggcgccgtccgggtttcgtcccaggtgcgtccccgacagcgagcgagcgagcgctgccgccaaagaggcacgcgtcgacctcaatcagcaacactgacgcctgccgttccttcgcttcgacctactacagctccaggaggaccttcctaccgccgaggagtttggcgagagcccgaccgaggcccctggccgtgggtagctcgccttcgctgcatcgctcccggctgacaccggcgctcccttcggcccccagtgcccgagaaccccgggtcggacaagccggcgacgttcgacttccagctgcccgagttcaaggaggagcccgagccgggaacgcccatcgtgcgtcgactttgccccccgaagcagagtgtcgatcggccccgtcgctgacctgcccgcgcacccctcagccctggatcctggccttcaactcggacaagttcccgtcgtcgacctcgtcgccctcgcaggctgccccgcaggagccgcacgtccccaagctctttaccacggccgacccgtcgacgcacctcggcggcggaccttcggctgcgctctcgacgcccatctcgaccgacccgatgaagacggacgccgtcgttgaggccggcgctgaccaccccaaccggaagctcaacgctgacgagcgccgcggactctacgtcctcgctggcatcctcgccgccggtttcggcctgagcacgctcgccaaccccaaggttcgcaaggcggccaagaagctcgagcgcgacgccgagcggctcgcccacgagggcaaggagaaggccgagtcgctcctccacgagggcaaggacaaggccgagttgctccttcacaagggtcaggccaagggcgaggatgttcttgccaagggcaagaacaaggtcgaggagggcaaggacaaggctgaggctctcctcgcaaagggccaagccaagggcgagaaggcgctcgagaagggcaaggcgaaggttgaggagggcaagaacaaggccgagaaggccgcggccgaggccaaggccaagggcgaggagctgctcgccgagggcaaggctaagggtgagaaggcgctcgcaaagggcgagaaggctgcggccgaggccaagggcgaggcaaagcgggtggccaagggcgtcaaggacgagtagaggaggaacgcaacatatctctctgccctgctattgtatctcagctcgctgcccgccccccttcatgttgccgtcaggggtcctgaagccggaagcgtcgaaacaagagccgccgactctcgcccgcgttcgccgagaggaacgaaagtcgagacgagccgcctcgtcgagctcagcccctcaaaccaccactgctcctcgttgtattcccctcctccgcctccttctccctccccctcgcgaacatgagcacaggcaagactgtcggcatcctcggcggcggccagctcggccggatgctcgcccacccggcggcgctcctctctatcccgctcctcatcctcgactcgggcgccagcacgccggccaagcaggtcatcctgccgccgcccggccatgcctcgcacgtcgacgggccttttacctcgcgcgagcacattcttgagctcgcgagcaaggtcgacgtcctgacggtcgagattgagcacgtcgacgccaacgtcctcgacgaggtcgagcaggccggcaaggtcgaggttcacccgagcccgcggacgatcaaggtcatccaggacaagtatgagcagaagcgctacctcgtcgagcgcgaagttgccgtcgccgacttcctcccggttgagcgttcgacgagcgacccggccgtcgtcgagcagtcgatccaggccgccgcccgcgagctcggcctgccgctcatgctcaaggcccggacgctcgcctacgacggccggggcaactttgtcctcaaggaaacgagcgcttctgccatcgccaaggcgctcgagttcctcggggaccggccgctctacgccgagcgctgggcgccgttcgaccgcgagattgccgtcatggtcgtccggacgccgacgggcgaggtcgcgagctacgacccggtggagacggtccacgaggacagcatcctccgcctcgtcctctgcccgctccgggccggcggcaagggcgtcatttctcgggccaagcagctcgccgagaaggccgtctcgtgcctccacggcgcaggcatttttggtgttgagatgttcctcatgcccgacagtgcgtatgggcgccctcacgcagtcatcctctcgctgacctgctcgacccttgccaagactcgctcctcatcaacgagattgcgccccggccgcacaactctggccaccacacgatcgaggcctgccacacgtcgcagtttgagaaccacctgcgggcgattacgtcgctcccgctcggctcgaccgcgctcaaggtccccgcgacggcaatgatcaacctgatcggcctctcgggctcgatgaaggagatcaaggcgtgcgtcgcgacggcgctcgccatcgagggcgcttcggtccacctgtacggcaaggccgagtgccggaccggccgcaagatgggccacatcaccgttactgccgacagcgacgccgagctgatcgagcgcgtccggccaatcctcgaggcctcgctcccgtcgtcgagcaagctgccggcaaagtactgcccgccggcgcccgtctcgggcctctcgtcggcgagcccgctcgtcggcatcatcatgggctccgactcggacctgccaacgatggcggccgctgctcagatgctcgagctcttcaaggtcccttacgagctgacaatcgtctcggcccaccggacgcccgaccggatggtcacctacgcccgcgaggctgccagccgcggcctgcgctgcatcatcgccggtgcgggcggcgccgctcatctgcctggcatggtcgccgccatgacggctctgccggtcgtcggcgtgcccgtcaagggcagcgtcctcgacggtgtcgactcgctgcactcgattgtccagatgcctgtttgtcccggcagcctccccctctgaattcgtcgcgcccttgctgactcgcgcgttctccaaatccagcgcggcatccccgtcgcgacggttgcgatcggcaactcgacgaacgccggcctgctcgctgtccgcatcgtgtcggcgtcggtgccgcacctcgtcaaggacatggaggcttacctcgcctcgctcgagaccgaggttcagggcaaggccgaccggctcgagagcatcggctggacgagctacctcgagggcatgaagaagtagactctgaaatggacctgctcagggacctgcgtggattcgaggcagctcggcgggagggcagctcatgcccatctggcaagggcaggcgggccacgctcagtccttgacggtcgcgccgacgacgtgcgaggcccagcaccacttgtcgacggcctcgtcgatgatctgggaagaacgggcgcttcgtcagtccctgagcacatcgatggcggagacatgggacatgccttgctcgtcggcttgcctgcgccgtggccggccttcttctcgacgcggagcagggccggctggccgttgtgctggagctcggccgcgagcttgaacgagtggagcgggctgacgcgatcgtcgtggtcggccgtcgtgatcagcatcgggttgtacttggggcttgcgacgacgttgtgaagcggcgagagcgggcgcataaagtcaaagtcggcaggctcgtcgacgttgccgtagtctgaggcccagtacttgccgatgccgaagcggtggaactggcgaggggctgagtgtcagaccggatgccttcgcaggcagcagcagaagcagcgacgcacgttcagtaagtccatgacgccgacgtcggccacggtcgcgccgagcaagcccacgggtgcccgctgggtcgccgctgcgacgaccatgccgccgtttgagccgccattgatgatgatcttacccgggctaaaggcagcggcaaagggctcgtcagcgcgcgtcgctctcggcttccaggctcgacacagcgaccaacctcgtgtacttgtgctcgacgaggtactcggaggcggcaatcaggtcgtcgatcgtcttgtgctgggatcaaaggcaaagattaggccaggccgaccgaccgatgggcgggcgggcaaaggtcttcaccttgttttcgaggatgccacccttgtgccactgtaaggggaatgagcgcgtgtcagaccgctgggacgctcagcgacggcaagtgaaggacgaaccttttctccgtactctccgccacctcgcagcgcagggacagcctgcgagacgttgacaagtcagtgagagtccatggcggagctagacagcaggccaagggcagagacgcaccagcacgccagagaaggtcttaacccaagtcatccacgacgggctgaaacgggctgagagggggattttgaacccgcctgcgaattaaatttcaatatgggcggggttgaatctgccgaaaagaaagggttggaacttgccatactggtattgcagagcaggtgcgctcccgtcgagcttctggtcggcacggcgggtgatagtcatctgtgaggcagagcagtgaggcaaacaggtcagctcgcgcgcagtcatcacgccgccgcagccagaccgaccgggatccgcgtgccgtccttgctgtggtagaagacctgctccgagataaactcgctgagagggagagatggcaggcaaaagcaggcgtgcgtcagcgtctaatgactatgaagagagcgaacctaggtcgaagctgctgcagcggcggctggcagaaggtacgcgcacctcggctgaaggtccatcttggtgtccctgattagctcgaggtcgccctcatccggcttgttcttctcaaagtcgaactcgtagacggcgccgggcgagaggtaagaagtgaccgagacgaagaagcgcttgtgggcacgccggccgctgacgccgagcgagccgacaaagtcgggcaggaagcgtcggatccgcttgccgtttgcgagctcgtgcaggtagagctggtcgttgacgtcgcgcgagtagccaagcaggaggaggtcgtcccggatcagctgggctgactcgagcacggcgtcggggtcctcagcgatgagctcggtgaacgacggctcggcggcggcgacgtcgacgacgacaaccttctcgttcggcgcgtccttgttggtctggaaccagaaggtcgagccgtcgttgcccatgctgaagagaaggaggccgtcgtcagcaacggcgacaacgagactgcaaacttggagtgccgtactagctgtagtaggcgccccactccgagacgatcgacttccacttgagctgcgagtacgggacgccctcctcgagccgggcgacgctcagcagggccgacggcgccgtgtccttgctgctcgagagcagcgcccactggccgtcggtcgtcacgctgacgccaaacatccactctgggttggcctcgtcctggtggacgagctcgtcctcggcttggctcgtcccgagccggtggtagtagattgcggcgtcccggtcagaggccgtggccgtgccgaggtcgtcgttgggcccagccgtcgtcgggaagcgctggtaaaagaagcccttctcgtcgtgcgtccacgtgacggacgaaaacttgacaaactggacgacgtcggcgagcttgcttgcgtcctcgacgccctcgaacggcgcctcggtcgagcggacgtagacggtcgaccagtcggagccctgggcgcagaaacaaaggaacgtcagcagagagtagacgctgacgggcgcgcctgcgacggcactgaccgacttgctcaggccgtacgcccagagcttaccgctctcggtgaaggacgactgggcgagcgagatcgtgccgtcctcgctcaggaggttcgggtcaaagaagagctcccctggcgggccgttcgtctgacggtaggcgtcgagcttgtcgaccggcgttctgtagatcgggtactgattctctacccctttattatgtgtgtaaacgtagaatgccgagtcgcccttgcccttgagcgccggggccgacgtctcgggagggggcggaagggagcgagagcctgtcagcgggtatacccggcttgaccacgagtcgctcaaatgagcgctcagccgcagcgggtatgcccggttggccatgagacttccatctagaggctcgcgaccggctcaccttcggatagttccagttggcctcgagcgccttgcggaaggcggcccggccgggggcggcttcgagctgcgcctggcagtaggcggcctgggcgtcgacgaaggcctcggtctccttcgactcggacggcggctgctcgagccagtgataagctgcgtcacgggcggcagaagcagcagcgacaggttagctgtgcgacggggaggaggtcgcggatgttccgacatcaaaggggcaggaggcttcgacgccttccaccctgcctcccctccgtcgtcctcctcccccaacctctcttgcctccggaccgtcccttcttccctccttctgcccagcatcccatccatctcccgctccttcttcctgccagccctcccggccgacgcgccatggcagccgaggtgcgtcagcttgagagctcccgacgcgcgcgagccctcctccctctccctctttctctccgggccttggctagcgagcgcctttgccctccggccgcgcgtgtggcccagctgccggactcccctacggcatcacagcagagccgctgacgcccccgactccatcgctcgaccttgccactcttgaccgctagaagactcaggaccgaggtgcgtcacgctgcctccgccctctcctctcgcgcgacccgacgggcccggctgccgcgcgcgtcgcagagccggccgaggacggatcctccggcgaccgttgtcccgacgacttctcgcgctcgcctctcgatgtgccagacgccgtagctgaccggcctgtcacgccccctgtcgctcttccgacaggagcacgtccgaagcagacgtacgtcgacctcatcaagacggccatcaccaaccacggcggagagggggccgccttgcaggacgtacgtctcgcaaagcgagaggcaacgctcatcgtgagcagtcgctgactggcccgtcgagcgccgccctctgcatcgcctttcgtagatctacgagtcgattcagaatgcgcactcgtacttctcaccggaaggcaaaggctggaaggtgcgcgcacgtcgctggacctcgggcggttccgtcaacgatcgcgctgctgacagtcctttgctcttcttgatctgaccccgcggccgagcagaacagcgtccggcatacgctctcgctgaacccggccttctacaacgtgcgtcagcagagcgtggtcgcttgctgtgcgactggctgacctggcgtttatcttgtctccaggtgcctcggacggatccgcagccgggcaagggcggtctctggcggattgaccactcggtccgttctctggctcgttgagcccgcgcaaagttgctctggctgaacctttcaaccactttcttttgcttcttttgcaggctccagagatctttacgagaaagcggaatccaaagccgagccagaaggccaaacaggagcgtgctgctgctgccgctgccgctgcggccgccggaggggaaggcgcggacccggctgcgatgtctgacctacccgcgccaccgccgaccaagcgagcgcggaaggctgcgttatcgccaaagtccaaggcgtccttgtcgaaaaagggctctgccagcgcagcggccttgccagccacaaacggccttactggcgcactcggtccggcagaagacggcaacgtgggcctgccgccgctggcgagtccacctcggccgacgctctcggctctttaccccgggcaggccttcaaccagtacggccaggcggtttacatgccgaacggcaccggccagaacgtcggccaagacggcccgccgttcttctcggcgctcttcaacaacccgggccagccgtcgttcgaccagcccggtcgctcgctgcagcagcaccagcagcagcaacctcagtcgctgcagctcgcccagcttgcctcggacgctggcaaccccatccactcctccaactttccttcatcatcggcctatccgccctaccagatgcacaacagcgcgctctcgtcgcacctctacggcgtcaaccctccggccgggcagctctactcgggcggcggctatccgtacccgattcagcagcagcagcagcagcagcagatgccgtcgtcgtcctcacatcagctgccgcacctgcatctgaacccactgtcgtcgggctcgcagggcagccggtcgcccgctggctttacgtaccagtcgccggcttcgacggcccagggcgcgctcgtcagcccgcagcagccgttccagcagggcttcccgtcgcccgatcagtcgaaccagctggcaccgtcacatcacttcgccaggtctggcgagtcaccgagcggtctgagcggtcacgagcccgggcagacgggcggcggcggcgggggccagcaaaccctcagcggaccgcactcgcgcggcccttacccgtcgtttgaggcaaaccagttccgggcgccgccgctcctttcgcagcagcaccagcagcatcagttttcgttgcacaacctcgcgcctggctcgcactttccgagcttgccttacatgccgtcgttccccgaccacggtcccggctcggtctcctttctgcctgatgcgtttagtggcggcggatctcggccgaccgacggcgactctggcaacggcggccagcaagagtcgctccagcaccacttttcgggtcactcgacccagtcgtcgtcgtcggcctcgactccgcagcagcagtttgagaacccaaaggcctggccgccgccaccggccggccttcaacagccgccgacgtcgctgcacaacgaaattctccggcagcggtcgccgctcatcaagcccgagtcgtcgctgacctcgccctcgatacggccgcccaaggtcgagcgcgagattggcgtccccgtcacggtcgccaactctggctgacggcgaccaggtccgatccctccttcccgtctctctcgtctcaggcgtctgccggtcttccactctctacgctcctccctcgctcctctaccgctttgcacctaccccctagtcttgttcaatcatcgcaaccgatagcacacgcactcacgccctcccctgctttccctttgtacaccctttaactcgtccccgctacgacccccgccgcgacttcgatcgtatgaccttgagcacgtcccctttcctactcgccgcgtcctcagcgtgtgccataaggaggtgtcatgatgcatcgtctggtccatatctgccgcacagccccagaggaggaggaggcacgatgctaagtctagtctaggctccggcgcgagaggacgctcgtgatctcgcggtgggcctcgagccacttggcaaagtcgagctcgcgctcgccggccgtctcgttggtggcggtcgccgcctgctgcaagagggccttagactcgagcaggtagtcgcacatgacctggagagcaagagagaaccgtcagaggcaaggcactcgcgaagggaagggatggcaggctcgactgacgaccagcgtcccgtagcggtagaggtagttgcacccaagctcgcgcagcgtcacttgctttgtcgacccgtccggcgcggcttcggatttgagctaggacgaggggggtgtcagtccctggacgaagcgcaactcatgcaacgactgcgctcaccttgtagtcgtagacggcctgccggaggttctggacgccgtcgaggtggtcgatgacgcggtcggcgagccgcttggccgccttgccgagcgggagaaccgagacgagcgtcaggatggtccggtactcgccattgaggtacgggttgctctcctcgtcggcgccagacgggagcgagaagacgtctgacggcgtcgacgggagcgagacgaccgacgcaatgagcgacgaaatgatcataccggtcgtcgtgcggccgcgacccctgcagagcaaagcacgcgggtattgtcagcgacggcgcaaaagaaagaggcacgaaaaggaatgcccggcgacagacatctggcagttgaaactcatgtcggcgttcgcccggagggcgccgaggacacggtggacgagtgcgtccagtgcgagcggaagcggtgcctgctcgtccgtctggagggtgagagcgcaaagacaacggatagtcagcgcaagctgtcatgcagagtgaacgaccggcagccgagaccactcacgatggcgatccgtgcatagttgaccttgtagccctccgaggcaacctggtcatagacctcgcgcggcgtgaggacgtcggcctcggtgatgctctcccagatctgtcgccgcgcaaaagggaaggagcgtcagcggccggtcaccgagcaccgagtctcggaagcgcaaacgcaccgggacaatctcaaagttgccgtcctcgtcgaccacttcgtcgtggaggaggagccggttgccctccatccggctgacctcgcgcaggacgtcgcgcttgagctgcacctccatcgcctcgacgacgtcggtcgtgacgccggtcgcctcgacgttaacgagaggccggttctcgagccgaagaacgtgcggccggcccgagatgtagatgacgggctccctaaaggccagagacagcctgtcagcgccaagttccgctctcgtgccgagagaacagcagccactcactctcgcagcgacgtccagtaaacgacctccttgccgtccttgccggcgcccatcttgtcgagcgcctggcgcagaccggcactcgacggcatgccggtgccgtagaccttgcgggccgaaagggcgccgtctcggctcgcggtgaccgctgcgtcagccttgcggtagttgggagctccgtcaacacgtctgtcgcgtgaagggggcatctggcggtcagctggcagccaaaagcgggccggtagaaaagggactgactcgggcagcgactgcttctggaggttcttgaaaaagtctgatttgaggatcgtcaaggccgagaggatctgtcgggagatgtgcgtcagataagaggaaatcgagcggcggatgtgcggcggggcgcacctggccacgacgggccgagacgacagcgaggacctcgtcggtcatggcaacgccgtcagcaggcgccatgcgcgagacgggcgcgaggacctcgagtccgccctcctttatctccttgcggaaggtgttgaagactgtgcatcggcctcggtgtcaatcggtctgcgggatcagacgcgttcgcaggggcaggaggagacgtaccgggccgctttgagatgaaatggccaaacgactccaggttctcaaacgtgtcgagctgcagctcctcgaggtaagcctggtagagtacgagctcgaagtagcgccggaggtggtgaatgccttcctgcgtgtagcgctccttggcctccgggtccgtctcctcggcggcacgggctaaggcaagacgggcgcaagggtgatcagcaagactctcgcgtcgtgagtgaacaggcggaagattcgagacgcaccccgggcctcttcgatgcagtcgcgaaggttgatgccctcgccggcctgatcgatcgcgctgtcgacggcctgcttgacctcgagcccattgcgaatgacgcggagcaggttgttgatgacctgccagctcatcgcggtcgaacgcgacaggtgcttggacggcgcccggttcttgccgaccgagtgctgacgcgtcggccggctgcgctggacgatgctctcgccactgatgacggcgtcctcctcctcatgcgccgccgccggcccaagcgaggcctcggtcttgggttttgaccggtgccgattcagccacgcctgggtgagcagcaggatgacggacgcgaccgtgctctgaaggggggtagatagggtgagcaggaacactggccggtctgcgggagaagagcaggacgcacccggccccgaccgagctggtcgttgaggacgacgacggtcgtctcccagtctgtcgtgatgacgaggcgcatcagctcacgcaggtcgttcgagtcgggcggccgttcgctcgtcatcggcaaccgcttgaagagcaggtcgaggtctttggccgagtcgccggcatcctccatgatctcgcggaccgaggcgaccgaggcctcttcggcgtcctcccagacgggcacgaccgagccagaggccgtctcagagtggagcagtaggctgtagaggggttgagaagcaggggtgtcagctgctgcagtccaggcaggcggaggccagccgttactcacgagccctcgaacgagaccaactcggcgatgacgtcgcccttgagccggtcctcgagagcctcgagccgctgcgcagtgacgccgctgtagtcctatagggtcgcgaggtcgatggatcagcaagcgggggcccaatacgagggagactgccgcacgcaccttcatgttgcggagcgagaggccctccttgcggaggcagtacggcttgccgttaacataggtcagcggctcctcgcggagattgagccagagaatcgtcttggccttgggcgttcgctccttaatgcgctcgaggacctcgtcgatagccgtctcggtcggctggccgcacgcaaatatggtagagttagggatctggcggaagccgaccgcgccgcgcaggccgtcggttgacgaggccgtctgggtgagccactggtccgacttgaggagtgtgttggcacggaggatgaggccggtcctctgtgcgacgacggcgtcgacccactcaaactcgacgacttgtccgccgctcggctcaacctgccggcctgcggcgcgcgagaggctcgatagctccgaaataggtgcgaaaatgtagagccgcgagcccatccggtggcccttgcggaggaacatgatttgactagaggaagcagaggactcaagggatcagcgccgtgccgcgatcgagtccgtaccagaaagttggcctcacttccagatctcggaccgagccttcagccagctcgaaaagcggccattgaggccgtccgagtcctcggcaaaggcggcaaaggcaatcaggaaaaagtacttttcgagcgcctgcgcggccttgtcgagcgccgtctgccgagcactctcgtcgagctcgagcgatgctttgatccggtaagagatgatctcctcgcgcaggttgacgacctggtcgcacgactctatgacgctatcaacgagcgacttgacggccttgccgccctcgacgcagccaaggagactcaggatgacctgatagttgcccatgtgggccgaccggagcgagtcgagcagtgccggtcgtggcgagaggagcgaggccgccgtcgtccggccggtgttggcacgcgaggaaagtgcctcgtcgagcaggtgcgttagcgcgagcagcgactggttcagtgcgtgctgctgcgtataggactggaggagacgcgacgactgggtgtttgccggcggcgagcccgggctcggggacgtgacgccgagcgggccgggggagatgacacccgagggcgtgccgatgcggctgatgctgttcagagggcccgacgcctgctgggaaaaggggtcggcgaggccgagccggagaaactggtgccggcggacgatgcaggcggccgtcatggcaaacgtcgtccggatgacgcccatgccgcagttgatgacgaccgaggtcgtcagcgggtcgagccctttaaggacggcgaggtaggcgtcgaggtaattgtcctcgatcggccggtcgggcgagatggggatgctgagagagagtgacagccagagtcagccacaagctaggcgcggctgtgcggacgtggaggagggcgcaccggtggtactcgaccttccagccctcgcgggcaaagtcctcatagacctcgcggaccgtcttgacgctgtcctcgtcaacctgaagccagacaccgacaagccccccggactcgtgctcggccgaagcgtgcgacggggcaacctcctcgtgcgcgagcaggacgccgccgtacgaggcagcctccttgaggacgtcgcgcttcaggcgctcttcgacggcctctagcgcggctgctgagccggcccagggcatcgtccgcagcggcgtcgacgcatcgcgaaggacgtagggtcggccagcaatgtaaaggagcggctggcgagaggagcatggcaagcacgtccgacaccgtcagcggctgggagaacaggacgggctgagctccggccagagccggcaagtcagtgctctcacctcttcgcgcgtcgagaggcagactgtcttgtgggtcgtcgactgaggtgacgactgaaggatcgagagcaacgttttgacggcgggcacagtcggttgagcagtctgggagagcaggaggtcagcgaacgttccacaccactgtgacgtgggtcaggacggctcggctgccggaggacgcacgccgtagacgccaagctgctcggcctcgcccttgacggcacggaagttgggtgctccgacgagcaagaggtcaaggtcgagcgctcggccagttgggtagtgatctagagggaccagacaaggagggcgagagatcagccctggcagccgaggggtcggccgggtcagcttcactactcacccgtcttgaggatcgagttcttggtcaggacggtgccgtctctgcgccgtacaacgccaggctgcgacttgagcaagtgggccggcgagccgaccgatggccctgcgttgagcgtgagggcgaccatggaggcaggaaagaaggtgatggtcggagggagctgtcgccgcctcgtgggctcggcggacgagcggcttgctccggcctccggagccttgcaagtcgtccgacggccggaggtggtgcactcgcagacgggaggacgtgactcgctttcatggttgacaggtacacagcttcaatatgaacatcgcttcggtctaagggcaacaaacgccccccatctgaaagtcttcttgaggaggaataatgtgcagggcctcagaggctggtcgacgcgaagttagggtggtcagcaaagcaggcaaggagacggctcgggacgtgcagagggcttacccgagaaggcgcatgataaagtagcccgggccgacgatgacgagcgtcgcgaggacggtcgccgggatgccattcttgaggaagtcggaggcgtcgaggtagcggttgccgagcgagtcctcctgcgcgatcgcgctcatgttggggaaacccgagacggggagacccatgccggccgagcagatgagtgcggttgcctggagaggcaaggatggtcgtcagcgagggcggctgccgccgggagctggacaagccggggcgcaccatgatgagcagccgcgggtgagggtcctcgaggctctcgccgatgcgcgaggcgatgggcacgagcaggacggcggcgatcgtgtgcgagatgaaggtggcgatgaccatgacgacgagcgaaaagacggcgaggatctgccagagcgagaggccgccgaccatcttttcgagaaaagcgtcgaggtcctccagcaggcccgacgagaggacggccttgccgagcgcgatgccacccatggcgaggtagacgatcgaccactggaagtggtggaaatcgtccttggagaggacgccggtgccgaaaaaggcgacgagcgggatgatggcgatgatgcccatgtctccaatgtactgctcgaggctcttttcaacgcaccagaggccgatcgtcccgagcgtgacgctcaggacaaaccagtggacgccggtaaacttgtcgccgtgcggcttgatcgacgggatctggaggtccttctcccaccggtagccgaggtggagggctgcccagatgagaaggagcgagagcgaggcgaccgggagcgagatggcaaaccactgcagccagtcgagctcggggtccatcgcctgaagggcgatcaggttctgcggcgacgagatcggcgacgcctggccgccaatgttggatgcgagggcgatggcaatgatcaggcagcgcgtgaactgcgagtttggcggcagcttctccgtaatgggctgcaggcgggtcgggcggttcagcacggcacgccagagtcgtcggtcagtctcagggccaggcgcaccttgatcaaggcaaagcagagcgtcggagcggcgacgttactgatccacatcgaggcaaaggtcgcaacgcccatctggctgagaagaaccatgctcgggctcgtcccggccaggttgaggatccgcttggccatgatggcgtccatgcgcgttttgctgagagcggccgcgatcgtaaagccgccaatgaggagcatgatggtcgggctaaacatctgtgaaaagatgaacctggcggagagaaggttgagtcagccctctggagctttcgagacgagcagaccgagggcggacgcacttggtcgcgtcgttggccgacaggcgctcgtccttgccgtcagtcgagcgtaggactctgaggacgacgacgaggaagggcactgcgagcgaggtgacgaaaagtggaatggcctgcgaaacagtaagagagtcagcagacatcccaaccttcagagtcggcgcatggggggcaccgacctcggtcgcccaaaggatcgtgcaaaatacgagcatggcgcagcagttgcgctcctcgacccgttcaaacgtcgggatcgcacccgagctgagcaagatgagaacgacgaggccgaacgagaagagcgcggcaccgcgcgtgaagaatgccggccggtagagcgtgccgagcggcgtcttgacgacgggccgccagcgctccttgctctcggccgcgcctcgcgagcgcgggtccggaacggccgtcaggaaaccgccggccgtgtcgttcgtgcgcgaggcgtggaccatctggcgccagacggtgtcgcgctcgatgacaaccttctcgcgcagctgcgagccgagctggcgcgaggcgagctcgcggtcgccgccgacgacgacgcgggcatacgtcgtcaggaggtgcttgtcttgcgtctcgagcaggtgcttggtcaccggcaggtacgggtagtacgttgtcaggctgttttccaggtagtagtcctttgtcttggagcccgtgatcttgtcgaacctgcagagggatcggcggtcagcgataaggacttgcgcgcactcatggggtgccagggcggcagggcgcacttcttgacggccttcttgacaccctcctggttgagctcgcggaagctggcgagcgcggtccagtcaaaccagagctgggcgatccggcgcttgtagagaatcttgagcatacttgcgtgctggccgggtgaggtccagacgtagacggtcggcacgccgctgaagccatccgacgtcgtcgaggcgtgcatcgtgctcatcgtgccgggcgcggcagcggcgagcgagatggggtcgaccgggacgaggccgagctcgccgggggcagccgagccgccctggaggcccgaggtcgacgatgagacaagcgacgacctccgcatccggcgccggacggtcatcggcgacttgagggcgcccgtcgccgagcggtccgaggtcgtccgcttgttggccggcggctgggcgtgcttgccgtcaaagtagtcggtcgagccactcagctgggccgtgctgatccggggcgaattctcgggcgacgagtcgtcgtcgtgctcgcctccatccccaccgccctcgatctggccaggcccgtaaggattcgtgttgcggagccgagcggcgtggtacgactgctgggcctcaaagaggtcagtcgtgtcgcggtccgaaagcgggacgctcggcgagttgccctcctggaagatgtctgtcggagaagggggtcaggtgatccaggccgtcagtaagcagaacgtcttgacactaagggacgacaacagcgagccccgacgcactcgagatccggttgcgcgagcgcgagcgtgtcttgcgctgcgtgttcgcaaagccgccgaggctgccgaggtggctctcgccctcgttctcgtcgccgtcaccgacgggctcgagcccgccatcggccggctcccagctctcctccttgacgcgctcgaggtcgcgctcctcctcctcgcgcaggtcgcggtcgagctcctcgcccgcgcgcaggagctcgcgctccttgtcctcgtagaagttggcaatcttgcggagctctttgtcgagcagcttgaagaagtgctggtgaccctttgcgatctcgccgccagtcgagacctcggcctctgccgtcgtcaagagaggcgcggcctcgaggtcggtgtacgagctcgtcggtggccgggcggcccgctgggcggccggcgcaggttccgggatggccttcttcagggcctcataatcgacgtacgagtcgagccagtcggcccgagcgttgaacaggagggcggtcctggagtgtggcggggaggagatgcggcgagggcgagcgacgggccgacatgagcggttcggagggagcaggcaaacaattgggggatgccgccaggtcagcccatatgcccctctcgagaccgcgagaacagccaagcagagtgcgtgctgaaggatccgacgcacccgaacttcatggtccaggcggcgcagcggcgttcgtcggcgagggtgagccgatcgtaagggcggacgtccgggcgagggaagtcgctgtcgctgtcgctggcgctagcgtcgtcggcgtcgtcggcgtggaggggcgcgagttcgtactcggggcttgcaggggttgctggacggccgacaaagaagagacgctcaaggagggacgtcgtcgtgaggagggcgagacgaaagctgccctgtcgcggatggaggccggtgggaaggaagaggggacagggccgcgcgagaaaggcagcagagctcagagtcggtcagaggtcgagtagtcggatgatggttggccggctggcgtctctctcctcttctcgaccctcgctctgagctgcactttggcaggcctagctctggcaggcgcgggtagcgtcgaactaaccgacccttggcggggacaagctcatgcccgccaaggccctgctgcccgggggcgctattgacccgtcgtgcaccggctccgagggacgtcacgtcgtcgttccttccgccttttgctgaccctctcgccttgctggctgacactcagcgccctcgagtcttgagctggaccgtacatctgttcgtgacttcctcggccagtgcgcgccggcaatcggagccgcggctgaccgttcacgacgaagcgcgcctcaccctactcgctgacggctggcaagctgatgcagtcagtgctgctcgagacaatgtctagcgctgcgtctgatgcttgttgtgcatcgggcggctgcggagcaatctccccttccgcacctcctcgactcgacgtcggcgtcggcacggctaccctctcttcctgctgtgtcaggcgaggacaatcaacatgggtagcccggaggaggcagcaatacagtgtgaggaagacggggaaggtaaagacgggtaaccaagggcggactgaataagcgagcagcgtcgctccaccgcgagagagtaagaggaatgggtggacgcaggccggtagggcgcagaccgacgaccaactctcgtgcatgagagaggccggctcgctcacggaccgatggcttgagaaagaacaggtgtaggggggcggcctgctcatgcggcgaccttggccgtgaccgagtgtggcggcgaggtggttcttgacgagccctctaggctgccctcggtcgtcgtctcggtgccgacgctctcggtcgccagacgcgactccatctgctcgcgacgggcccgaagtggattcgacttgctcatacctggcggggcgcgcgcagaagaggcacaagggtcagctcgaggttgcccgtgtgaagcgcgccgctctcctgctcgcaccgcgcggccggaaccattccctctcttcgtgcgagcgagctcgagggtgagtggtccggggaccggcagggcgggagatcggcgcggcggacgggcgaaccacgtcggacgcacctctcttgacaagcggcgggaagtcgcagacgtcgccgcgcttgacgcagcgcctgcaggcgacctgggcgagaccgatcccatcggctggcggcgtgccgtcgcactttgtagaccggaagcaagcaagagggcagggtcgaggtgaaggggagggtggagggaggggtggtcagctcggcgttaagtgcttgctgagcgagtgggcgggcggggcgggagcaaagattgagcgaagcagccagcagcaagcagcgcaccttgtcttttgccctccggcaggcctcgcaggcgtgcgtcgtcttgcctcgcttggcgctctcgacaacagcggtcaacgctggcggctctttgcgcttgttcgatggcttgcgggcgcgagctggcgagctctgctgagcgaccgccagcggcggcggcgagcgcgagccaccgtcgttggatccggcggaggcgcccgcggtgagcggtggcgagggcggaggtgggccggacacttggccgacagctggccggacctttggtatcgacagccgacggctcgcaggcggccgacgctgctgcttgaagacggctggaggcggcggcggcggcggtgcaggcgtttggggctcgggcgagagcgacgagctcgcggtcgacgagcagcggctcgagtagggcatgcgcgcgcgcgggtattggcttccggacggtttcgctgaccgccgcgggaagggctgctacggtgcacgggcgtctggtaggacgcgagggggcgaggcggcagggacgggaggttgtcgttcggtggcgactgctgctgctgctgctgcagctgcgagagaggaggagatgtggttaggaggaggacgaggacgaggtgaaggaggccagccagcgcaaggcggaggagcttctcttccgggcgagtcttccgcccttcccacgcggcatttgcatccttcgccccgctcggccggcccacgccgcgttcatgattctcgctgcaggcgctggcgaagcagccaccgtcgatccttgccagcagcacttgcacaaaggaccgacctctggctgcgagcgagcaagagggtctgcgggcgccccttcgcctccgcccccggaagacgcttccctctttaatgatgagaccgggttcgacgttggggatgaaggggacagctcggagccgtcgcgtctgcggagcggatgtcggagcgtcaagtcgacggcatcaaggggacatgcagagcgggcgagaggcggaggaggagatcgtggcagaagagacagcagatggaagtgcaaggcgagtcttggcggctgaggccaaggcgtcggtccgtgaaagaagtcgtttcgagaaaggcggcgaaagggagagatgaggagggataagtcgccggctggtcttcaggcgaggagcgacgactggcgccggtgagggtaggcctcgacattctccttatcgtccgacacgccgtcgagctcgttgctgggggcgacaccggcgatggaaggaaatacgtcctcggtcaccgtcggtctggccgccactgagagcctccgagccttgacggcccctccgggcgttgtcgacgatactgaggtcgagagagaccgccgcggcgtcggttgcgagctggcgtcggccgtcttgccggctgctgcaggtgcgaacgacgagcgccggggcgtcgcgttggactctgcgagaagtcgagggaccgccgtcattgttgttgtcgtcgatggcgcaagccgcttcgacgacgttcggccgaacggggttgcaggattctgtgcgccgctcgtgcttattgagagccgggcgacaacagtggcagcagcggctgcacgagccgagggggcacgcgaggccgtcgacggcgtcggaacgctgctgaccgccgcgaaggctgctgtcgacgacgaggtcgacgccgagaggtcgcctgctgcgctcgaccgagggcgaccgccgacgctggtccgcgtgctgctgccagggacgtgcttgagcccgggcgtgcccatcgcgagagacgatcgcggccgagcggcggctccggcagtcggtcggccgaatgggcccggcgtctcgggcatgccaccgagagagagatggctactggcgctggcgctcgggacggatggcgtcgccggtgcgactgagtgcctgcgcgagacggccgatgccgaaggcgcgaagacggtcgtcgatccgccgctggcaagcgaggtcctgcccgtggctggcgtgcagccgccgacgcccttgacgccaaagcgacgcttgacgagctcaagctcctgctgcttcgagtcgagcgcaatctcgacgccctcgagtgtctcgcggacctcgtcccgcgatcggaggaggtggaggatgcggacctgtttatcagcgagggcaagagggaggtcagccatctcgcaagcgggatccctcactctgccggcagactcgcctctttggcagcgtcttccgctttgagatgggcaatctgcttcgtcaagcgctcgagctcgccgctctcggcgaccgagcggaagctcgacgtctggagctcgatgctgcgtgaggcatgctcggcgacgagtccgtcaaagcgccgcgagaggtcggcccggttgcgctcgagtgccgtcgtttcgcgcacgcggtcggccagctcgtgccgaagcgaccggatcgtccgctcacgctcgtggcaggcgctgtcgagcgcctcgcgcgccgccgaggccgcagcatgggcagccgcatcggcctcgtcgagctgggtctgaagcgagacgacaagcgccgtcttgccgttaagtgtcgccgtcagccgggtgagctcgtcctgaagtgcgtcggctttggcaaggtgccggtcctgcgtcgcgacgaggtcggcgttggcggcgcggacccgcttcagctcctccatctcgagcgaatgcaggtcggtcgtcgagtcgacggtctgtatagacgattttgtcagttcatcagtctctctgcctctcgcgcccctctcgacgctcgagcgacgtacctctgtcagccgctccacctcggcaaccttctctgcgatcgcctgcgaatggttgtcaagttggccgagcagctcctcgcgttcctcccaggcagagtcgcgctcggcgaggactgcatcgcgctcagtgatgagctcgtcgcgctcggccgcccagtcgtcggcgctgggagatccaatgccggcgagcgcatcgtcccgctcggccatgagctcctcctgctcggcaagcaaagcgtcacgttcgtcttggacggccgcgaggtcagcctgcaggccgtcgatcgtctcgtccgtctgcaagagtgacgcggccagctggtcgcgatgctggcggagccggacaagctcgtcctgcgtctcgtccgcccgcttccactggtggtcgagctcgtcctggtgcatcgtaatcgtccgggcgtccttgatcgtctgctcggcgagccggtcgaggtcgcgtcgagcggcagctagcgcaacgacgagcgcagaaggtgcgccggccttgttcgttgaaaggtcgaccagatcctcggcggtcggccgactcaggagctggctaatcttggcctcgagcgtagcgacctgtgcccgctgctcggttgcttcacggtggtgcgaggcgaggatgtcctgcagctggtcggtcgattctgcaacgctggcagccagccgagcctcgagtcgctcgatgacacgctcccggtccgcaaccttgccctcgagcgcctcgttcaggagcgtgtgggcgatggcgtcctgttcgagggccgagatttgtgcgaccgcagcgtccttctcgagcgcagagtcaatcagtcgggcggcgaggcgcttgatctcggcttgctgggccgccacttgctcctggagttcgacgactgcttcgtcccggtcggcgagctggtccgcaaggctgcctgggatggcctcatcggccggggtcgaggtgccggtcgtcacggcctcgcccttgacctgcaggtcacggacctcggcttccagtctggcgagctgctcgcgcgcggcatactcgcgaccgagtgcctcgtccttgaggctggcctcctcagtcgcaatccagcgggcctggtcggcgtcattgcgctgcatgacaagctggacctcgaggtcgcggacgtcgcccatgcggtcgatctgcgaccgtgccgtcttaagctcggcctccttccgccggagcgtcgactcgagctcggccgcgatcgcgagctggaggtcgtacttcttctgcgtgacggccagcagctcgcggtgtgactggtagaactcggcgttgagcgcggcgacgtccgacgtcgggacaaggaccggctggccaggcgagggtgcgcgcgggaagctggctatcagcgaccgcgtcaggggtgaggacggtgcgtagtcaacgctgtcgccctcgaggaaggagaggatgagcgagggcgagctcggctgaccaggcgagaggccgcggtcgatgagcgagcgcgagaacgacgcctcggggtcaaatagcgaccggtccgggtcggcgagaacgagcgacttgtcgggtgggctctcgagctccatctgcatgatccgcagctggaggtcggcccgcggcgtgtgatagatcgtcaggtcgccacgcgagtcggaggtcggaggcgagctcttggggggcgtcgtcgtgagggcggtcgagggcggcacggccggggacgccctcggcggcgaatgcgagtagaagtcgaggacgctcgagaaggacgactgggtcgccagccgggaccgctcgtcgcccttggcgtgcagctgaaccgtctgcgtcgagtctcctgagtagtcgtcaagcgcgaccgaagcctgctcgcgaccggcgatccttccatttgaccgggtcgagctctcgagatcctcgtaggggaaagagagagacgtcggcgtcggcaggtcgtacgacgcgggcgtcgcaggcgccgacccgtgccaaccgccgtcggctccgaaggttgactggtcgtcctctggcagtcggtcggtgacgtcgcggagattcgacatgtcgaccggtgggtggagcatgtggagcgaatgcaggttcgactgcgatatattcgattcgcccgaggcgccgccggcgaggggcaacggctgccggacggccggcgacctcgaaggcgttttggtgacggccgcgagtcggtccgacttgccgagcttccgaccttcgtctggcgtagccggcgagacgtcctgcagctgtgcaagaaaggagcgggacactgggccctggagcggcgtcgacggcagactgggagcggccgggaagaagctcggctcgaccgagggcttctgctggccgatcggagagcccatcgctggaacgccggtcgccatcgagtagtcctccgagtcatcctgctgcgacgaggccgcgggcgacgaggccgcgggcgacgtcgcctcagagacggtcgacggcggcggcgaaatgatgtggacgttgtcccggctagcggacgagaagcatcgtcagtcaacaatcagccgccacgaggtcgacctcgaccatggccggacgtacgagaagaaacggacgctactgccgctcgccggcgtcacgcccccgcgcccgaggtcgcggaggataccgcgcttgcttgctggcgtcccaagcggtacgctctcgaggcggtggaacgactgaagggcggcctcgacggcggcatcgtcgaggctgaccgagacgtcaggcgaggaccgcgaggccttgtatggagagaggtacggcgaggtgcctgtgtcaaagagggggggaggccctagcgttagcaagctgtgaaccctcaagcagcgatccgaggcgggagaatcgacctgtgggccgttgaagcaaggggctagttggcaccggttcccagtcagagaggtcctcgcggccgggcgtccgacccgccttcgacccaggcgtgtagaagctcgcgtcctcttcctcgtcggcctcgcccgctgcccttccggccgatccatggcgcgagcggcccgtcgacgtcaagctctccatcgaccggtttcggtggaggaagagtccgcggacgctcgaccgctggggcgtcgtccggcttgccgtcgtgtgggcgcgaggccggccggctggggtcggcgagccgacaggggtggaggacaccggaagcgaccggttggcggccttgttgcggaacatcgagaggtttgggtgggcgttgaggagtccgttgatgacagacgagtcagacgaggagcgcggaactgtatgcaagagtaggcagtgtcagctgccggtctttgaagccaacgagtgaaagggcaacaggtcgcctgttgactgacggggtcggtctgcgtcggcccgctcggcctgctccgccttacttgccgagctcgggacggcccgcttcttgaacatagaggcgagcatggtgtcggcaggagagcctctgctttgaccttgcgagggctgctcaggtctagaaggggcaagggacacggctggagagaggatgggggtcgggaggcgacgaaagatcaggcgcgtcgatctgttgacgcgttcgtttctcgttagggcgagctagggtcggctaacagcgacccttcagtcaccttgcgggacccagactctcagatacggaacgaacgatggccgacacgcaggcggctcaagagtgcgtaccatccttggttgtacgtcttcgagctgcagctcgtcaagaggctgacggctggtctcctcgctcccgtcatcccccgccccgtttccccctttcgacccgaccggttcgcgctttgacctccccctctcttcgacccgctccggcgccgacgacctgccgcacctcagtgtgctcgccgactttcatgcccagcccttccacattgcccagatgcgccagcgtttcgccgaccaagcccagtccgacctaacgagcacgtattccgactcggccctcgcccaagacccgtccaacccaacgctcctcgcggccgagatcgaggccgaggtcgactttttcaaaaagatcaagttcaagtatcgcgagcaggaggcaaaggagtcgttcctgaagctcatcctggcggaccatccggagcagattgaccaggctgagaatgaggcggtcggtgcgtcgcccgcccggcccgagtcgcgcttgctcagcatttgcgctgcgggctgacccgtctcgacccctcttgtaatttcagcggcggagaacgaagaggccaaagcggtcctcaggcaagccaaggagcatctcgccacgctcaagagcgaggtcctccagctcgcagaggaggtcgcgaccggtgcgcgcgcagctccctcacttctcacccctctcgcctgcctcgggggctgaccagctgcttgccgaactcgctcgacatctttgcgggcacacagactatacggcgctgtcggctgacatggccgaggctgaccagctgaagaaggaggtgcgcgagatggagctcgagctcgctcgtctccgcgcagccttcccgctctccgaggttcctccccccccctttcctctcacccttgcccgcacgggcgagtccaagactgaccgttcgttgttgttgctgtcctatcgcagcgcatcaccgtcgacgaggccaacgaggtgctcgacgaccagatccaggagctccaggagctggccgaaacgatggatggccaggcaaaggccatcgacgagacgaagcgcgacattggccggctcgtcaaggaggtacggcgcgctggtcccctcaagcctgtcgctttttgcctgcgatcgctttgacgcatacggggctgacacgctctctctatccggcgcccgacttggggcacaggtcgacgcgctcgagccagagtacctgaaggagcaggcccggcttcgggccaaagagtcgaacaagacgagccagccgcgcgaggtcgtccagctcgaagaattctgccagtggtctgttccctccctcacacctctcttgcgctctctctctctctctcagcgcgttccttctgaccacctacccgaccgactgccttccccgcatgcgacgcatacaggtaccagacgacgctcggcctccaccagtcgttcctcgccatccgctcgatcgccaaacaaggtccgaacgaggtccacatcgtctatgacctccctccggcgacggcggccgacgacgacgacgacaaagcagcagcagacggcatcacgctcgtcctcgtcatccagccgtcggcgtccggccggcaaaaggggacgcttttgaacgccacggtccgtgccctgcgctctcccctcccagccacggctccctctcacgcgtgactgacgacgacgggaacggtttttgacgatgctcagctgctcggctcggagatcgacatcggccaggcggtcgcgagcgcggtcccgacaaacgacgtgccgaggctcgtcggcgacgtcctccttctcctgcgctcatcggcatagcgcgcgcgcgccggcccaccgcccatctcggtttctttcgtggtctccctcctcctgtcgacacgctaggtcgaggggcaggtgcttgctcttgccctccaacttggtgtccacatccccctcgctctccaccttgcccggcccttctgcttcccttctctttcttgacgatctcacgccccccccttcccctttccgctggtctgaccgcacttgatcagccactcgtgccggcacgccaggacctctgcgccctcgctctgtcgaccataccgtcatgcacgacttcgtcgctcgggctggatgcggggctctcgcattcctcccgcacgccgcaaagcaaaaaaaaaaaaaaaaaaaaagggcgatcgaaaacgaaagtcggaacggccctcccaagcgcgctgcgcaagaggatggtccgtcgtttcttgctggcaggctacgatgagagggaggaggccgggctctggagcagcagagagagagagaagacgggtggtcgagctgagcatgcctcgtctaggcagaaaggacgcttgaaggaggggctgacggacgagcgtcgtcgtcgtcctgctactgctgcgcggccacagagtcggatgcgtcagccctcgctgtggctcttgctctctcgttcttgccgtcccctctcttgtcagcccaccgacgaattctctcttgtcgagcagcagtagacgacggccaccaagagtagcttctcgtcgtaggccagaggtaatcgaccgaacacccatcactgcccgccactacggcccttctgccgccacgccgccggcgcccgacccctctagcttcccacgggaccggacccgagccgaacccagcagagtcgtccgactcctaccctcccgctcgttaggctccgtcgtaagctgcccgcccttgtcgttctttctctctatcatctatcaccgcctctctgacaccgacctcaacccgcatatagaccactttcgacgctgcccttcgacggccagcaaccaatctcgactcgacacgctcgcgcttcgcacctgctcccgtcgtcttccacccagacccggattcaagctttccgcaacccaccaccctctttacgatgcgccggccgtcgacctcgccgcacggcagcagcagcagcagcagcaacaacggtagtggcaacgcctccaagggcgccagcaacagcaagaagccgccgcgccgtgactcgcgctcgcgcccggtggccttgccctcagccgacttctcgccctcgcaagcgttccacctctcgcgcccaatcctcggctcgctcgcctcgctcggtgccctcctcctcgtcgtcgcctcgccgctctcgggcgtctacctgctcgagagcgtcggactcacccgcacggctgaggacgggagcgatcggtgggagaggggcggcgtcggcgtctggggcggatgcgtccgggatggcgggaggtacggcctccgtcttctccctcgctcttgtttgacactgcccgcgcaccgtcctgacgtccccccccccccccttgtcttcgctcgtctcgccttgcccgaccgctcagcttcctctcgcagtcgtgctccctctcactccccttcccagcagccggctcaagctcgtcgtccgcagcaagtctctccgccttggcaccctcctccccgttcgcctccgccgcaatatcgacgccctcgctcccgtccttctcgacgctcctcccccagagcctctcgctcattctcatcctcgccctcgccggcgccctcaccgccgcactcaccacccacgccctgacgtcgtacatcctctggggctcgctctcggagctcggtcggccagagggcagcgccgtccatcacacgcccgcgggcaggctccgctttggcgagggacggtggaggaggaaatggcgcgggagggtgcgcaaggtcggactgtttggtgttgggagctgcgcggtcgcggtgcgtcctcctctcctcctctccctccccttacctcgcatcgcccatctctgtggacgagcagggctgactccccccggtccgctcctcgtcaatcggcagtgcgctgtcatcctctcgccgctccttccaaccttctacatggggcggcgctggctggaggggcgaatggggaggatgagcatggggaggaagcagtggctcttggcccgcttaaagtcgacgacggtcagtccactttctcttcttccccttcctgtcatcgcttcagccccgaaactgacgctttctcaccccatcccgccatcgaaggctcgttcgccctcgcccactggacgaaatacgagcgcgtcctcgcctcgctcgcccaccatcaccatccctctcagcagcccgactcgcacccccacgcgcccgaagatccgacgccgggccccagcaccaccatcaccgcagctattggtcgcccgcccggggcgtttgcaagcggcccgtgcgccgtctgtcacgagtcggtcgagctctccaagccgggcgagtttgtgctttgtccggctggagggggcgggaggtcgtttttccctcctccggcgaccgtggggatggcggtaggggagatgggggtgtgtgaggatgggggcgaggaagttgggtgcgaggcgctttcgcacttgacgtgtcttgctcggcactttctcgacccggtcggttccgtcgacaacggcgacggcgtcgacctccactcctacgcccagcagcagccgtccagccggcccgccaggctcgtcccgctcgaaggccgctgtccggcctgccttgcccagcttgattggggcgaggtcgtccgttcactctgggcgatcgggcgcgggcgggcgggcgagtttgacccggaccggcggggcaggcggaggcgcgggaagggcaagggcaagggaagggaggtcggaggactgacgaccgaggaagaggacgacgacgacgacgacgacggacggtcgagcgtcgctggctcggctacgtcgacgacgacgactggcgccgacgagagcgagggcagcgacgaggacgccgtgcagcatgcgaagccggcggcgaagaagcgttcgacgacgaagccggcggcgagatgtccgtcacagggccgaggcgaggctactgaatcggtacgttcgaccgcctttgggcgggcggggacgagctcgtttcgactgtacgagaacgacgagctgatgcgccccctttcccacgttctctccctccttgtcaggccgcctgttctgcaccccaaccgcccagtcgcagtcgaccccctccgccaactttgacatcgacgagcgccgccgtccgaaggaacatgcgcataggcggcggtgacagcgaagagagtgacatcgactttcccgaggacgtcgtgtgtccttccgcccacaatctgccgtccagcatggccgacctcctccgctaacaaccctgtcactcgctaccgctttcagctgccccgagcgcgccgcctgccgggacctccgacgccctcggctgcccttgccaatctcgccctgacctcgcccttccctccgacgcccgccgccgacggtccacatgcccggctcgccacttacgcggttggcagtagcacgagcaacagcggcagcaagaagcggacgagcctcccgctcgagccgggtggcgatccagcgccgcctgcagccaagcgccagagtccggcccagcgccaggggccagcaacagcggtcgcgccgttctacgtcgagctgagcgacagcgactgaaatttgatggccaatacgtttgtggagaagcgggtcataaagcgagagaaaaggaaaggggttgcttgcagagttgggcttgttgcgtcgggatgtaggtcgtcagaggtgcggcggcgagaatgggcagaggagggagcggatagcaggttggagtgtccgtggcggcaggagatgaagagtggaaaatagaggggcgatgctacagaggggtcgaggcgaggcgaattttagggcggaaagcgggcaggagatcgtccttagccgaggagggcgtcctcgatgaaacggttgatggcgtccttgcggccagagaggtcgacgccccactcgcgctcgaggtccttgcggacgcccttcttggtgacggcattcaggtcggcgtcggcgaggatgcgccggaccgagccctcgagctcagcatccgacggctgctcgccgccgccgccgccgccgcgctgcgaaggcgctgcctggtatatcgacgtcgcccgatcgttgtcgcggtacggccggtcctggtagggctgctcgaaaccctgttgcgggccggcacctccgccgtagaacgaggcgctcggcgggaggtagcccgcctgggagccgtgcgggctgtggaccgtctgtcggtcaaagactgggggcgagccgccgcgggccaggggcgcttggtagagcgtctgtcggccgtagagcgactcagcgccggcctccatcatctcacgctttgacggcggtacccaggagccgaccgagtggttcgactcgcggtcccagagctcgttctgaagtaatcgtaggggcggagtcagcggctgggcagacgtctcgactcgacgagtgctaagacgcacctcgtagtcgttccacgtcttgagcgggatcgacctggggtcaaagatgccctcggtctgagaggaggaggacaagacgagtggcgcgtcagcgcagcatgtgagcaagagagtcgagccggggagagtggggacgtacgtgctggacaatcttcttgccgccctcgccctggatcatgcgggtcgagccccagctgaagtcgtccatgtaccagaacgaccagagcggaaggatgaaggagaagacggggatggcgaggatgtagaagaccatccagccaatcatgtcccatttccccctaaaaaggaaaatgagggcctggatgccgtagatggcggcgagcatgatgatcgagagcgtcggaatcgtcttcccctcgccggcgacgaggtagattaggtagacgagctgcaaaagaagtgcaaaggcgtcagtcgagaatgacctggacggaagggaaaagcggcacaacgcacgtaggcgaccgtgaccggggcggtgatcgtcgagagaaggtcgataaagacgacaaagcgcatcgaaaagcagcagaagccgcagagcttgtcgacaaaaatgagctcggccaggttgtggacggtcgagttgatccaccgccggcgctgcgagatgaggactttccagtcgtcgggcgcgaccgtctgcgcgtgcgccggccggacaaacgtcgtcttgtacgtcgggaagtgcttgagcaggagcgtcgtcaggtagcggtcctcgccgaggtgaagcaaattcttgaggctaagttgagggcaatcggaacccagtcagcaacccaacggacaagacaggtcggttcgcgacgtactggagcgtgtcgacgcggttctccgagtagtcgaggatgatctggtccgagataaacagcggcttgtgcgtgtcgggcgtgcggatccggtagagcgtgaagcaaccgggcaaacaggtgacggagccgaaaaggctctcaaacgacttggccaggtggtgcgagatgaaatactcgtagacctggtgcacgagagcaggcgccgggccaatcagcatcgcagcgagccttggggcgaggggatgctgcctggctcaaagagtggcgcacctgcatcatggtgacgagcgactgcttggcattggcgagcgatgtctcgccgcagcaggcgatgaccttcttgtcgttgatcatgctgcagagaggcgtggtgagaagatggaatgtcagtctccttgcccccaagctgccaggaggcttgcagccgacgcacgcagagatgaggaagttgagcgagttctcttcggccgtcgtatcggcgtcgaccgtgaagaggtactcgtagaagctcgggttgacgccgatgacattcttgatctggtggtacatctcgagttcgagcgggttcatcggcgtgttgaagtggacctggagcgcacgccagcagcaacgtcggatcagcatggagggctacggcgagggggatcgaggtgcggcacaccttgttgaggaagtgcattagcgtcatctgcgagtcgcgcttgccacggttgcccggccggttacgctcgctcggcttgccgaccttgacgatgacgaggtaagggacgacgtggccggcgcactcgtacaggccagagtagatcttgcccatgttatgctggcggttgccctcgccgagcgactggaagctgagcgcctcgggctcgagcgtcggatcgacgccgagaatgtcgagcacgatccgcggcgtcgaccggtcgttgcccgagccgacaatgttgccgtcgcagacaacggcaatcagcttgcgcttgtcgtcatagcggagccgggcgagcgagtcgatcgtcttgcggagcgagctctcgccctcggtgtagcacggcacctggcagatgacaaacttgtcgtggtcctgcggcgccttgcgggagccaaaccagagcgcgccaaggaacttgaagccgatgatcgacaccatgatgaccgagaggacgagcaaaaggtactcggcaaacttgcactgggtcgactgccggttgtcgaccatgccgacgaggtagctttggtagcggaggacaggcaggcgagtcagctgggcgggtctccgagaggcgcgagaggagaccaaaaggggagacggacaggttgcggaggcaggtcagctggcgctggagcgtcgccgcgtcgaggacgccgtccgagacgagggcgtcgagccgcttggtgatgtccttaccggcctgctgctggaagagctggatgacctggggcgcgaggaactgggtgctgacgccaggcccggcctgcgtacccgccggcgtccggaggtagggcggcgagcggatgtaatcggtgatgtcgtagacgtgcgagtcgtagacggcgaccgcgtcgccgtcgccggcgttcttcttaatcgtcttggggaggatgccgacaaagccgagccgaaagttgtaccgcatgtaaatcatttgctcgaagtaccagtcgggccgcgagtcgttggtgaaggctcggaagtcgtggtagacggcgtttgtgtcggtcgaggccgagctgttgagcgagttgatctggacccacgggctgacggtgccgtcgatgccgtcgcagagcgcgctgacctgaaccggaaagagggacgaggcatcgaggccgccgtactgcagcacggccttctccttgacaataggaatcacgacctggtgcgtcttggcgatcgaggtgagctgcagcgaggcaaggcgggggtcagatgctgttgggccgagtcgatgaaagggggaaaggggcgactcacgtcaaagacctcaccgcggatcgagacgtactccttgtccgggttgttgatgtacgactgctgcgagatctcgcccgcgctgtagacgtactggcgggggcagatgaggttgccaaggatcgcgatgacaaagacggcgctgcccatgatcgaccagatcaagaggttgatcgcgagcttctcacgccatgcctggcggacgtcgggccgcttgaacgtcttgaagaggctgagcaaagggctcggcagccaccacgtcagcgcccagacgagcgcgagccactttttccgcgcgcccgacgtcttgtagacctcggtcgtctcctccttggccgccagcgtctggccgtcgagctccttggagtgcagcttggccttttcgacgtcggcaaacatgtttttcgacggcgcataggcctcggtgccgacgttcgaggtcgagtcgtcgacgttcgaggtaaagtgggtcggcgcatagtcgtcgtagctgcgcatcgtcttgccgtcgtcaaagtcgtcccgctcggcctgctgggcatggccgacgagcggcgccgtctgcgaaaagctcgacaggttgccggtgctcgcgcccatcagtcgcgagttggcgtgcggctcagacaggtcgtacgacgagtagcggtacggcgagaaggggtcgaggccctcgccgcccgagagaccgagcttgccatcgagctcgcgctcctgcttctgcttgagctcatcggcatcggtcgcccggagccggtcttcgagcttgcggaaggcgccgtggccgacaaagacctggattgaaggggaccaggggcgcaggtcagtcgcgagggagagcgggcagcctttcaaccgacgcagcgcaccttgaattggccgacggccagctccttgtcgggccagccacgcgcggccttgtactcgcgcacgacgtcggcgggcgaggcgccttcaaagccctcgacgtcctcggcgtaacgctcgacaaactcggtgtgcgacatgctgacttcaaatgtgacggccgcccggcgggtcatctcgggcagagccatgcttcggatttgggccttgagcccgcggctctcgagctggttcggcagctggacgtcgttcggcgtcagagcaaagacggtccaagccttcgtctcgtcgaaggcctcgaagagggtgtcgagcgccgacttgaacgtgccaacaacgcaacggatctggttgccggcgcgggccggctggccgtcggcatcctcgtcggcgtcgtcgtcggcacccgtcgacatcttgagcccaccaccgcggccacccttgcgcttcgtcgacggctggcgcatcggcttgaccgactgctgggcggcgacgaccgtctcctggtcgcgcgggtggacctgggtggcaatcgcgcgagtgttgaagaggtcccgaatgaacgtgttggtcgagcccgggaacgccgcgccggccgcgctcgcgccctgggccgggccgcgcaggagggcgacaaagtcggggttgacggcgtcggcattcttctcgaggaaattttcgctcgagtaggtgacgggaccggtgtagtggttgacggtaaaggtcgggtagccggtccggtcgacggcgccggctttgaagctcgggtggtggccccagcgcttggcgagcgcctcggccatcgtgtggtccgtctttttgggcatccgctgcgtctggtcgtccatgatgtggatcagtccgccaggcgtcgtcgtcaggatccggagcgtctcggcattgtccgggtagtcgacggtcgggacgacggcagagagcccttcggccgcaaattcggccgtctggaggtcgaacgcgtgctggaggatccaaccttgaaggcgttcgttggcaaagttaacgcagagctggtcgagcgagttggaccgggcgccaaagcccgagaggttctgggagccaggcaagtcgaggatgccgataaagttcgcaaagtcgtcgcggcagagccgctcattgacgtgctcgttaacccaggcgaagaggagcgagtagagcgacttggcgaggtcgtcccggttggcagccgcgccctctgggtcgagaaagacattgaccatgtccttccggaccatctcgaccttgctgttgaggacctcctcgagctcggccgggccgacgccgagaaactcggcgaccgtctcgagcacgtcccagttgcggaccgaggcggcatctggattacggtcgtagtccatcgtgaactcgacgttgcccaggtggaggatggtcgcgacgagctggcagacctggccgacgagccgcttcgagacgccggccgccttgaaggcctgcttgagctgctcgaaacggacgcggtcctcgcccgcctcgcctccggtccgcggctgggccgcccggacgccgcccgagctcagcaaacggtagtgagccgggtcggacgagagccgaagaaattgctgctcctcgctagaggcgccggcgatcaggtagtagaagacgtggaagttgcgctcgccgggcgacggtccggcaacgcggctgcgctcgaggtagtagtcgagtgtcttggcgccgacgagccggccgcggtcggtaaactgaagctcggtgtacttgccaaagcgcgacgcgttcgcattctgaatcgtccgtgcgttgccgagcgcctcgaggatgaactgccagtgaggatcacaggtgagcgtcagcaggcggccagctgagacgacgagaggcagacccgacgcacctcggcgttggggatctgctgcgcgagctttgcgcctttcttgccgacgcctgggaccgaaaagtcgatgagcgccttggtggccagtcgccggagctccgacttgccgctgccagtctctccactgcgagcgagatagtccaagcgcggtgagggtcagtatggaggtccgaaggggggggggattaagttgggtgggcccacctcatcaagatgctctgatcgcggccggtccggcgcatatcaaagtaggccttctgtgcgagcccaaagatgtgcggcgggaggacgtcacggccgtcctcggtgttgcggtagtcctggccgtaggtcgcgaggctggcgtccgagttggtgtggacaaacttgtgggggttgatggcgactagcgaggccgggccgaggctcgtgtagatgaggtccatcaggtagcgatcgcgaaggcaggcctggatgaaggcggaaagtcagtctcggctgtgtagcccacagaaaagcgaaagccagcggcctacgtacgacgacactttcgtcagagacggcgacaagctcggctaagtcatccgtctgctcgctcttgcgcaggacgcgcgagtcgcggtagggcagaatctgcgtattgcgggacggcatggctgcgatccgggcagcgctccgagacgagagctggacagtgacctaggtgctttccactggagctagagggtcggcggacgtgcagacgaggaaggtgggccggcgatgtgagagtggacccagcaagagctagcaggggacgtcggctcgagtttgggcggctcagtcggcggagacgctggcagagctcgaagactagaggcagtcgacggcttctgacgaaagaaccttaagagcaagggagcttcacggagaaagagagggagtgaggagaggagaggaagcaaggtgtgagcgtgcgagctggagagtggctggccgggccgcgtcggtgggcaggcggcgaacgatcgggccctcacctcgaccggtctagctggtgggacacgggtcggttcgcttgcactggaaccccgagcttgccggctaggtgtgtaagagacggaagtcggacggaaagaggtgcagcggggacgagtcgttgacggagaagagcaagaggagggcgagcccagcagcttcgtctcgctcgcccgccctcgccgcgcagcaaaccaccgcccccttttgatgggcagtcaccaggccgacagcgcaggatcggtcgccggccatggcaagccagcagccgagaacgacgttctttgcaatagtctgctgcctagcgtgtcgcggcaggactcgtcgtcggctcgacggccggcagaccatctgccgtcttgggccagaaagaagctttcagagtgccgatgcagtcggcgcccgaaaagaagtcaagacgcgtcggcggcgagacgcgtacaagaaacagcgttgcatcgcagtcaaacaatggcaagggaagacagttgccgagcagagggggaaagggtgtacagatccagagaccatcgtgaggacaaaggcgacggaccagggctgaggctgttcttttcagcgctcgctccgcaccatcttgctgagcagcgagccctgctgccagagcccgtcctgcgtcttggcaacaggactgacggtggccgacgcggcattgccggccgagggtcggcggcttgagccgtaagtgccggcgccaaaagcggcgaggtcggccatggcgggcgagccggccgacaggggtccgcacgagccggccgatgttggcgagaggacggggaacaagcccgggttggccatcagaagcgagtgcgactagcgacgggtaacaagcggccatcagcgcgagaagccaatcgcccacctgcaaaaggactcactcgggcgtcgaggatgccgcggtacatgcggtcaaacgtgcggctgtcggtcgcaaagagatggatgaagtccgaggcattctcgaagaaggccgactgatcctctgcggcgggaaaggcaaaaagaggaggtgtcagcgctgagcgacgacagcgaaggagcaaggcggtcagggaccgacggctcttaagcgcaaagtagctgcctttgggcgccttggccggcactcgagtgacgaggtagaagtcgtaggcggtgagggtacagaggtgctgctcgtccttgccctgcgagagtcgcgtcgtgccatgcagagtcagcaagtcgctggtggggatgacaccgcaagctaggacgcacacgttcgttcttggcgaggctgacgccgccgccgcggacctcaaggtatcgcttcgaccacttcttcttccgggttgagtagatttggacccaaccgacgacgttcgggcactgattcggaatcgcctacagagagcaagggaatacggagcctcagcgctggctgatcaaagtggcaggagtcgtcagaagtggggctcacccgaagcgtcaggcactcgcatagcgaacagcgcttgaccacaaacaggttttcgcgctttgcctggttccagccagccaggacctggctgaggacctcgtagtcgcgcagcggtcgttctgaggagcagaagtcagccgccgtgatcatccagtgaaaggtggcgctcgcgactcaccgacggcccattcgtcgccgcgctcccatatggcaagctcgcccttgagcagattctcgcctgagcggccgacggggaggtcgcccctggccttgagcaactcgagcagcccgccagcggtcatcgactcgggcacctcgattcggatcaaccgcgcgacgtcgccatgctcgaggctgacggtcaacatccgggtagtttgcgacgagatgcggagccggtccagctctggcacgggaccgagcccgttgagcgtcggacgacgcgacattgccgctgacgactgctgcgtgctaccagacgcgaggttgggcgagggaaagttggtggaggagcccggcagaggaggcagcggtggtacctcggccgggtcggtcgattgccaacgggcggcggaggacagagagcgctggcgtgcgactgccccttgcagatgctcggagccctcgcgctgcatcggaagcgtcaaggactcgtgcgtcggcgaatgaggccgcgtagccgagatctgacggccgccattgggagccggaaggtactttgacttggcggccgattgagagcgcgcacgcgagagagcgcccgcacccgctggaagcggcaaggacggttcgagaccgaggccgatggcggacgccttacgcgacaacgagggcggtaagagagcgacgtttgaagccgaggccttgcgcgacaagacaggaggcggcatgctgctccccttgattcggtcaaagaccgctgggccggcatggagcggactgagggtcgtactctccagtcggctgcgaggcagggtcgagtcgtactcgttgccgaggcgaggacggagcacggccgctcgttccaggtcgcgcagcttgcgctcgagatcttctgcgcgaaagacgccgttcatgctcgacacgccgtacgcgctcggaaggtccgctggcaggagacgaggctcttgtgcaagcgagaggttggacgtgccaggacccgtgcgccgacgcgatggcggcgattcgattcgccgacgttcggccttgcgccgactacgctctgccgacttctctttccggcggtcgagtcgaaggctcttctgcgcggccaatgccgtcgtcggatgtgcgaccgcaagaggcacgtcgtcgtcgtcgggcgtcgtctcaatcggggtgatgaagtcggactcgctctcgctggcggagcccgacgacgaggaggaagacgacgaggtcgcgatgccggcgccaaacttgtcgactgctgcccgtcggtgtggaggcttacagtcggcgtcgctgccgacgcgagcaggcggcaacggacgtcgaggtcccgtcaaagcacgatttggcccgggaggggggagcggcacgcgatccgacgtgtctccgccgtagctgcgcgaccgaccgcgctcgtcacgctggcgttcaaccaacgtgtctggtatgagcgccgccgacgaagactgcggctgttttggcgagtgaggcccaggcgcgtgtgccaacgacgaggctgcgtttcgttgcaggcttcggcggcgcgatgccggcgcgagctcgggattcgaggtgccggccgtcggcggcaggagatctgacttgagcagaactggaggcatcgagcaatgcggcgaaacgaccgacggcatgctggagagagcaacgcaggtttccgagggctatcgagagcgtccggctgaaggtcagctcaaagcaacaacttgtggggtcctaccagcgcacgcgacccccccccccgccctccccagcagccggcccgaccggcagcagacacgccgtcacaagcaaaataatgcccagcgagggcgggccaagaagataatttggcgagacctcgtgttcagcagatggcgcagagcgctacgcgggactgacgagatgctcgagctacggcggggagagcgccgttccggggccggtcggtttgaggcggctttaccgggaggagcgaatcgaatggcggcgtgttcgaccgaagaagcgtccgaagagctgtcggcgcctcagcgacaggagtgtgaaaggacgctttaaggggaggagaaggaggagagtgagagggagtcgtggtcaggtcagagcaagagagctggtccggcgcggccggccctcgcgcagcaaggtcaatcctctccccgccaaggctagactcgtctacgctcgcgtcggttgctctcttgacaaaggcgccttgctcctatgtacagatcaattgtacagatcaactggcccatctaaacatgtgtacgggtcgatgcctcagtctcgcttcggccgcagggcgctcatcgcttggcgcagggacgcgcgctcgctggcccacctaggaagagaagcagcagacgccaagtcagcgtcgcgaagcaagtccgtcgggagtcttccggccgcggacgtacacggcgaccaggcagacaaggccaagaagtcctccgagaccgacatgacgaagcaggtttcgcaagcttgagaggccgtcggcgttggagcgaccactggcccggacgagcccggccgagagtccaacgacgcctgcgacggccgccctcggtaagacgtcgacgagcccgacagtccgcccgcgccgaccgagccaggtccgtgcgtaccggaagctgaagacgatgcggcagagcgagttgacgcagttggcccagacgaggccggcctcgggcctttcaagcacgcgtgcaagcccgccggccgagaggagaaaggcgatcgagaagaggaccatggcccggctctggcgggcgaggtcgatcggcgtcgccgtcgctgcaaagaaggcctcgagcatgccgttgagcgacatgagcggcaggtagagcgtgtagatgcgaaggatgctgcgcggcgtctggagccgggccggcgaccagcgcgcggccggcaagaggaaggagagtgcgagggggatgtagggcggaccaaaggccggcaggaggaggagtaggtgtgtcgagaagcggagcagtatcgtcaggatcatttgggctacgccgacttcggcgtgagagatccccgtggcgtccgtcgctgtcttcagtcccgggccctttgactcaggttgggcaggcaccgagacctggagcgacttggaaaagtagagccgagccgtctcctcgagcggctggaagacgatccgggcgacgagtgaccctgcaaggtcggttcggcatcaggcctgagatcgcgggtgcagcaatcagcgctagacgagagggcgcaccatagttggtggctactgcgtagccgccctggtcgcgaagcgggctgagccgggcgacgagcatccggtcgccctcggtcaaaaagtgcttgacgaccgactgctgtgtcatcgcccgagccagcgcaaatgacgctggatcgagataggtcgaggcgctgcaagacgattgactcgtgagtcagccatctcgttcagagggcacaagggcagagaaagccggacgcacgacagaccaccggcagctttgcacggaagccacatctgccacgaatcgcgcccgaacgcagccgcgaagcggcccaagagggcggtgccgtacgcgagctggccgattccgaagcctaggagagcgcccccctcgcgcatggaccagacgccgacgagggtgccgactgctttggcgatgacggcggcgccctcggcctggactcggacgccgagccggagatccgactgaagccgaatgtggtacggttccgaaaggagctcgaacaggtacgccagcaggtgcaggccgagcgagccgtagaagaacggctgcgcaaccgtcgacgctggcgagaaacggaggtagagcggcacgatgacggccaccaggccgaggaacagcggcagcgggactagagacaggttgagatcttgctgccggcgcgagcgatgttgcgcgacttcatctcgctgggcctgatcggctgccggctggtcctccgttgtgcgctcttcggtcgagcggccggagcgaaggagggcgccgcgtacgccctcccggctgaggaaaagcagagtcgagccaatcaggtcaaactggatgctggccgtcccaaagacctcgggcgagaccagccggaggagggcatagttgagcgagaaggtgatcgcacgcgacagcagctggagaaggacgagcgacctcgcggaagccaacgtcttgccgaggagcccttcgctcgtcgctgaaaccaaggctaggggcgagcgtactgaggacatcgtgcgggtcccctgcgtcggtcacgtcccgaatctgagcaggtcgagtttgaagctggaaggtagacgagatggtaggcgggaggccaggagaggaggcgcagctcagccgtcttgtcgagtttgcctctcgacagccactcgcatctttcgcccgtcccttcttctttgtcgcctcttgcagcttgctctcaagcataattggactagtccgcccgctcaacggctagttaccgcggcttcgagggaaggaaagagccagcggtgcgaggaactcggtcggccgaccatcgctgccgccgtcagcgcccgcacgcgactgcgtcctctcaacggccctcgctcgccgccggcatgcttaaggccaagcggctcgatgtcgtagagcaggtgcgagctcgcctactgaggcagagaccagagtggcgctgatcgtctaccgtcatccctcgcttgttgggcgcagcttgaccggctcgtcatggccctcagcgtccatgcctacttcagcgacccatcattcgcgctcctcctgctccgggtcatcgtacagatgcgtgagtggtcttgcgaaccttgcgctcgtcaatcttgacgaagagctgaccggccggttggacccttctagagctaaagcggccccaggcacacgcgcatcgaacgctgcccttctttgcccgcctcgtgacgaccctgttcgtcggttcgatctttcgcaaccagctctacgggcctggctcgggcgcggccaaccctccgtcgggtgtattcctcgattttatcgctcgaggtgagttgcagcactgatgacgatctcgaacagagcccgctctctgactctctcggggtcccgcgcaggctcggcgacgtcggcgacggcggtcctcgcccagacggcgctgatatatctgctgcaactcttctgcctcgtcgtcgcctacgagaccggccattcgccgccccctcgcgacctgccgcatcccttcttccttatcgccccgcgagcgatcgccccggcggcgcccactgccagtccaagcgttcgtgcactcgaggacctcgaagcccagccggaagacgaccctgacctcgtccaaacgggcgatgacgaggacgagcaggactgggtgccatacacggactttctgagcggccccgtcgctcgcggcgcacctgtgtcccagcggcgcaaagggaagagcgaggcagtcgaccggccgcgatcaccatcgacgtcgacatctctcctcctgccttcggaacggccgccggcgagcggcttgtcagccgtggaagggccctcgacggcgggcgagaacagaccttacctgccctccgacgacgaccctgctcggaacgctacgtttgacttcgccgacgcgccaattatcgtcatccggcctctgacgttcttgtcgcgctgcctgggcatcggcgtccatgcgcggccggcgtcagaggcagaaggcggacggttcagcgagtgggaggcattttggcacggaagcggcgccggctcaaggcgtgagctgctcggccttggcatgcgttaaacatgtcgtttgttttgcggacttccaggcgatctaaaagaaaggcgagaacgacaaagtcagaatctgtgcaggcgagcagtagaggcgtacgcacaagggcggcgcctgcgcgccatgatgtgagccgggcggccccagtcgtccgtcctctctcgatctcgaccatctcagtctcccactcccgaccacagtcacttgggtcctttgtcttgccctgcggtcggccgccagtacctcaccccgacgaagcgcgcccgggcagcggcgtcctcagcaggccagatggacggcgccgctcagcaggagctcgcccaccccctctcccccggccagccgatctcaaggacggcgttgaccgtacctcgctccgacagctcgtggagcggctcttgtcggtctcatctcccagcatagagcgcttcgcttggcagtcgtgctgataagcctaccgcgtgcgaaggccggccgacgagctacttcgacctgcaccactcgtcccaaccggtcgctctcacccctcatcccccttctgtcgcggtacgcccgagccaagatcatctctcagcaacgacacgcgattctgcaacagagtcatcgggatcgattcgtccagagccgagcagacggcggaatgtcccatcgagcagcgccgggcccggcgccgtcgccaacagctcgggctcgtcgtcgcctgtcaggtcgccgacccgaagtcccctgccacctcgggcggcatcgctctttgctccgattgcagacgacgtactctcggctcctacccatgctgtcaggccgatacccgatgccagcggcggcagtcgaacgccgcggtcgttccctgcttgggtctccgtctcaccccggtcgccacgactgcggtccgccagtcctcctggacgcccttcttctccatcgccggcctggacaaggccgtcgttgatattgacgagggaagaggaggaagtcctgggcgctcggtttgatctcatgtccgacgcagagctcgcagcggtccacgcccgctgggaggccgagcaggcactcaccggcgcctcctcgtcggccgcatcaagtccgagcgggacggtccctgaagagcctccgctcttccctgaggctagctcagtgaaggatcatccgcttcgggtgctggccagagcctgcaggaaactgtaccgagcggaacgcgagggccagcgagggacccaggtcgaaccggcttcggcacctgtcgcgggtgtcaaggcgccagagccgaatgagacgcagcatgtccctccgtcggtacgcttagtcggaaacagcgacgccttgggcccctcgtcgcttcggctccagagcgaactttacgacgccctctcaactacgctcgcgacagcgccggtcgcccgtcgccgcccttcctcgcggagatcatctactggtatctcagagcagccctcacaggcagcgtctatgtcgtcggccttcagccgagctttcaacgcggcctcgatggggtggtcctcatcaaagtctgtcgctcggtcatccgtcttgctgccaaaggcttcgtcactcgtcgaggctcctgcagaagtcgaggcgaccgctcgctccggcgacggatctctgcttttgcggacgacctccgtcccgtcggtcgaactcgactcgatcgagccgcaagagtcgcggccaccgacactggtctcggaccggagaggccttcgaaggctcttctctgcccatcggacggcatctgacgcggcaaaggttgcacggcagacgagccgcttcgccggcggcggcaaactagaaccgctgaccgaccagtacggcttcatttacaacacgcgtaacctcgcgctcttgcgcgaggcgagcgatgcgggcgcaccggcgccggccgtctttgctggcctgccccgggtcgaacccgagggcggtgccgacgacgaagacgtcgaggaggactgggtcgaagacaatatcgtcctgtgtcctggcgagatgtcccgacggccgacgtctagcggggcgcgcacgccggcgtccgccgagatgcagctctctgggtcgagtgcttctggtgtctcaatttcctttgtcgaaggctcgcaaatgctgtcctccgcgtccgtcgcgccgcgttcgaacggccgacaccgatcgtcgacaatcctgtctctcaatccgtcgccggccaggccatcggctgctcctcaagccatccatgcctcggccgacgtaatggccgtcggtaccgaccagagcctcccgtcgtctcatcgccaaacgtttggactgaccggtcgcaaggtgtgtgatctcctgtcctgcctgaagagtcctcgcgctgacagtcgcccatgctttgcggtgctgctagacgatccagctgctcctcaatcaactctccgacatccacgagcgccagcagacggcgcagaaggccgcttgggatgccttcctcaaaaggcgccaaccccagcgatccgaggcggcgtccgagggctttgttgggtttgcggcgatggcgacctcgggcaaggcgggcagagacgatcatcgcgagttcctgcggctcgtccggggcgggatcccgatcgtctaccggagcaaggtctggctcgaatgctcgggagcgcaggagttgatggctcctggcgagtacgccgagctgatcgaacaggccgagagggagggcgtcgcatcgaccacgctggccgagattgagaaggacgtcgttcggaccttggtgagatcgcctgcatcccgtcgcccttcaatgtttgcgtcctgaaagatgcccttcaacgcccccgaaacagcccttgaacatcttttttggcggcgacgggcctggcgttcccaagctccgccggctgctgacagcctacgcctggtgcgccagtctccttcaccgtcatctacttgtgctgatctgcctttgtctctgcgcaggcgcaacatcgatctcggctactgccagggcctgaacgtcagtgatccaatcgtctcgtcgactgttcgcggcactgacttgacctctccaagaccaacagatgctggccgcgactctgctcctcacccatgaacgagaggaggaggcgtcagtgctctgtgactgctcgccatgcgtggaaagccccccgactaaccctctgttgctcttctgccagcttctgggtcttcacgtgcatcgtcgagcggttgatgccgcccgactactacaccgcttcgcttctctgtgagtgagagcggcggccgaactttcaacctagcatttgacttgctcaagatttgccaactcgcctcttcgcgcaggctctcgggcggaccagcgcgtgcttcaggacctcgttcagcaggaactgccacggctcgaagcccacctgaccgcgctcggcgtcgaggtcgcagccgtctcgttcgcttggttcctctcgctctttacagactgccgtgagctctgtctccacgttactggccaagcgtcctctctgtcgctgactctcttcgtcttgccctgctgtccagtcccggtcgaggtgggtgatcatctttccgccaggggttgattgcgctggcttctgacccgcccttcgtccgtccaactgttttgctcgcagactctttttcgcctctgggacctcttctttgtcgaaggcttcgacatctttttccgctgcgcgatcgccgtgctccggatcaacgagccggccctcatggcgtgcgactcgatcggggtgcgtgctcgagttacgtccccccgagtggacgcttcacacgctgactcaagcccggtcctcaaccgcagacgctctacgagtcgctcgaggcctgtacgtcacggctctggtcgccagagcagctccttgcggtcgaactcgagctccagagcagagtctcgcacgccaacatcatcactcgccgcgccgttcatgtcgccgcccttgccgaagagctgacggccgggtgaggcgtcgtccggccgatcaaagaccaatcaagacagacatgtagaccagatggctttagacgaagacaggggcagaaaggcggcgtgcgcttctagatagggagtcgccgcctgtcaacagcagctgatgatgcagaggtgggccgaaaggaacccaaccgtgaagaacgtaggagggcgaagagaggagacatcgacggctgtgtctagaagagcgcggcgaggccggcgacggcgacgaaggcggcgctgaggccggtcgagagtgccagccgggaggacgcgtccgagccggcattggtcgagcttgctgacggcgagccgccagtcgccgtctgggtgttagagacgggcgccgcagacgtagcggctggagcgcgcgacttggtcgaagttgccggcgggtcggacgagccgggcgtcgtgcccgactgggtgacggcgtcgccgccaccgcagaggttgccaatgtccgagagcgggaggatgatctggggctggccattggtcacagtgacgacggtcgcgccgtccttgtcggtctgccacgaggtgcaggtaaagaggtcgacgaccgtcgtcgccgccggcaggctgctgttggacgggatcgagatggtgcccgaggcgccgctgagaccgcggttggacaggacggcgaccatcgggccctttgagacgacaatttcgtgggcgccataggtcgtgatctcggccggcgtcgtgtagaagttcgggtcggcggcaccggcctgcttgcggaaggccgtcaggttggccaggtagctgtagccaatgatttcggtcgagtagtcggacgtccacatcggctcgcggttggccgggtcctcgccgccgtcaaagccctgctcctggccgtaataggcgatcgggatgccgtcgatgacaaacggccaggcggcgtggttggcgaggagcatctggtcacggatgagcgaggccgcgcgaggcaaatcgtgaacctctgtaaaggtgccgaggagggtgttgtcctttgacttggcggccatgtcgaggtaagtgttggcgagaacggccatgctgccgctcgggttctggaacgcgtagaggttctggtagtagacggcgtacgagaggatgccgtccatgacctgggcgagagagccggcacgatcgtcaacaagcgaaagcagctgcagagagctgtggatgcaaaccgacctcggtgtagggcgcgaggtagttgaccgagccgtccagcacctcgccgacggcgtagacgccagcagcctcggtgaactgcggccaaaaatccttgcggacgtgcttgaccgtgtcgatccggatgccgtcgaccgagtagtcagcaacgacctgcttgatccatgcattatagtagtcgatgaccgtctggtcctctgtgtcgacctgcgccgcggcgaaacaggatgggtcagtttctggcggctgtgcggccagtgggaaggaggcaggaagcagacggacgtcgggcaggatgacgttgtcgtcgccaagccagcactgttcgaccgacgtctggttcgtgtagtcggggacgcaatacgggtggtagtcgccagcggcgtcgagcgggccgtgctccttgccaggcttaaagctccggccgtcggtcgacgcaacgtggttgacgacctaacaaggaaagaggcgagcaaagaagggggaggatggtcagcgcaatgtcgcaagcgtgacgacccacacactcgggacgcacgacatcgaccatcaggtacatgccccgcgcgtggagcccagcgctgaggtccttgagatcctggaccgtgccaaagtgcttgttgagcttgctgatgtccaagctccagtagctgtcgacaagaaggcagagggcagggagcgaagccggtcagcacagaaaggcggagcacgcgccctcgacgcgacgcgaagagacacacccgtgataggcctcgccggcctggttcgttccctcgaggttgtcaacgattggcgagatccagacggcatcaaagcccatgccctgaatgtagtcgagcttatccgctgaaggatggccggagggagcggtcaggaccagggactgcgcgagaagccaaagcggaaaagcagcggcgcgagcaaggagacgacgcgtactgagggcagcccatgttcctccgcagctggaggatgcgtacgaagctcgtcagtcggtaggcagtagcggacaggaagccgaccgcgccacgcactacttgcggtcgttaacgttgcagggcaggttgacgccgtcgggccgggctgttgacgccaagggagcagcagaaggtcagcccgtggcgcgtcgctcctcgccctctcgatgcctctcagcacgcaccaaagcggtcggtgacaacctggtagatcgtcttgtcgcgccactcggcggccgagagcgagaaggccggctggatgagggcggccgcgaaagcgacagctgagagggagccgagcatcgagggagaagtgaggaggcgcgcgagcttggcgcgaggatgggaggaagggagggtgttttgaaacgagtgtggtggtcgtgcgtcgagcagcgtcggcggtcgttgtcgatggcagagagcggtcagaggcaggcgggcgagcagtcggtcgcggtcttcgtccttggccgaaacgagaagagaagaaaggaagggagaatggtcagtggcgaagaagggcgagcaagagcttcgggccacggctgggcgtgcgcgccggggccgaaattcgatccaatcgctcgcggagccttcctctagctacttaacacaaacctcaattgtgtctgtcagtgatgcatggccaaaggggcaatcgatgagcgcaggcccgtcgtctaggctttccgctcagggcaaggcggcccatcgacacctccgaccgttcgtgggccttaatagcaccagctgtcgggtcaacaataagtacgtcctcctcctcgccgcctcataagacgcggagggacgtatcgtactcctcgcttggagtctctcgccgaccgagtcggcaagcggctggaccttctttatccggtgtctggtcgcggcctacctgttaatggacacccccctcgcaggtcgtcatatcaaatcgctaggtgctatcatggatgatcttccatgggcgcatcagaggtgatgtgccaagtacttccgagccaacgtcgctaagacgtcgggctcggcggccaagacactatttatgcagatcctctctgcgtcgatggcctctctcttcgcggaacgcgccctcggctccggtaccaggagctcgtcggctgcctcaactgttgagcgaaggacggtacggagtgagctacctcagtcaccaagaagtggactttacatgagatactctaggcacctgtcgagggaaggacgaaacggaatgccgcactcgtcgcaactctgaaaagctcgacctcccagctcatcctgatcagcggtctctcgactgttagctactctggtggactgaatgcttccggtcggggtcgtcacgacgagtgggagtgttgaagagggtgcgtcgtgtcggtttggcgggaggtcgcccggcgccggcgcactgcaggtcaccagcgccagcgcgtcgccgcccgccagcgcccttccccccacgtgatgttgaaagaagagcatcgtagtaaatttgcaggagagtcgccagcgccagcgcgctgcagcgcccgcccctctagtctgccctcaagggcatgaggctgtgggacctcgtcaccggccgccgagctcgtccggccgctggccacccgctcgcccaagccgcctgggacgccgacgatgaagccgccatcgagtttatcattgccaagctcgacgacaccgaggtcgggggggggggggcggttcgaaggttgggcgggcgcacggccgagagacagtagaggcagggtctctcagggcagctgactcgatttgactgtcccagccagtatcggtggctcaccaatcgtcgcggccgaggcaaaggacgaggccgcatcggcactcggtgcgggcgggttggcggccatgctggcgacggcggcgacggcggcggcggtcggaggcggcgtcgctgcgggcgaatgggacgcaaaggtcgacctgtttgtaaagcggggaagcgtacagcacacaaggaagacggccactcgcatcagctggacaagaggagacggaggactgggccagcctgccgggcccctggaggaggaaggaagagcagagacggacaggcgcttcttgttgggctgctcgtccgagccggtgggttttgctggcgagtcggccgccttcttgaccgtctgcgcgagcaacgggccgaggacgatcagtgccgcaaggagggagcgagtgttcgcctgggacagaccttcatcgaccgcgaacgtttcaggaccttgggtgccggacgcgattcgccctcaaagacgtattcgggcaggtcgacgctaagagttggtggaggcgagtcagtgcttggagggggagagcagagacgcgccgctcgagcctcacttgcggatgtggcggacgacgatgcccatcgtcgcctcctcaaacgagtcaatcatcttgacctgcttcatgaaatccgtcgtcgggtagctgatgtcgagcttgcgtttcgagttgtcgccggctgagagagacaggagacggtcgagtcagcggagagcgcaaacaacgcaaggcgggcgggtcgacacacgctgcttcggcttgatttggaggccgatgtagaacgtcattgtccagatcgacttggcgccctccttgccctcaatctcggcctcggtccgtgccttgagctcctcggtcgtgtcgccctgggcggcaagccggacctcctcctcggtcgtgcagtgcgcaacctgctcaaagcccttgatgaacggatgcgcaatgtcgagcatcgcgtcgccagagttttcgagcttcatgacgagctgccggagcttcgactcgaccgtgccagaccacttcttgtgcgagtccttgccggacgacgacgagatgacctgaaggtagtagctgcaccgggacgacagggcgcaagtgtttccaggtcagcccaaggccgacgagctgagcctaggccagagccaaagacgggcgcaccggtacgtgtggaagaagtcgtgcttgtcaaagagctcggcccagttgccgccctcggtgctacgctcgctccggaccatgaccatgtcgacaatctgtgccgctcgccgaaactcgtttgtcatgatcgtcttagtcgagtgcatgacgttgtgggtcgcgcacatggccgggtaagccggcgtgatgatcggcatcaggtgcgaccggtcggccgggtagatctgggaggagggaaggagggcagatgagcacgggtccggacggcgatcaagcggctcaatgccggacgcaccagcgggttccagaccttgagctgcatgttggacggtccattctcaatctttttgaggatgaccggctgcggccactgccaggcactgtagatggcgaaaaagcggccgacgatgccggcggcaagcgtcgtcgggtagagctggcagatgcgggccgtcagcatcgcccaagcgacgccgccgaggaagccggcgatgttcgagtagatggcccggcgtttggcccagagcttgatcgcccgaagcgcgtcccggaagacgtcgacgtttggcacaaggtgcaggatcaggtcggtgacgcgggagcctgcgaaaggggcaagcgtaaagagtcagccttcagggtctgagaggaggctagggacgggttcggacggaccgttcagactgcgctggttggcatcgtccatgccgcggaggatgctgtcgtccgagaggtcgaggtcgtctggcacagtcggcgccatgacgcgcgcaaagagaaagtcaaagtcgacgccggcaatgttggcgcctatgatcgggacgtaggcctccgggaccgcctgcagtttgggagcaggcatcagcaggtgctgatcagcgagccggtcgcctgtcacgcacagtgatctggccgatatcagggaacgccttgagcatgtcgcgaaataggccaaagaagtcctccttgacaatgtgcttcggcacgacgcagagtagatcgatatcggcaccaggaccatgaacgccgagcctaaaacgtcggccaacgattagctgctgaaggtgcagatgagcagagcgagggcgcgcacgcgtacgtaccggtacgagccgaaggtgaagatcttgccgccggcctcgcgcgaggcctgctccgagaggcccttggagagcgatgccttgtagacaaactgcttgacgagcgacaggatcgagccgaggaggcgctctctgatgcagcggcagggcgtcgggcggtcagtgggggaacaaggcgggcagctggccctggagggacagaagtcgactagacgcgacgggagctccgagcttgcaataattgccagcggctctgctctgcttgtacgataatcaaagaggtggacccgccggacatggtagggcggcaacagtcgaaccccgacagtgcgctgctcgaccgtgacccgccgcctcctctcctgcgagcgcacccgccctgcgagcagtccctttgccggttgccctccctctactggacttgtagacaaacagaaacgtacctcagtcggccatcctccttgctctcgaactggttctgcttcaggagctcgttcatcaggcccttggtcgcgttgacgtcggccggcttgggcgggtcggtcgagattggcggcgtcacgccgagcagcttgaacggcgcgctgcaatgaggagagactcgtcagactgttctgcttgagccgaagccgcgtatgccgaggacgtacgatgcagacatgacgatggggacggtcggtgttgaggcaggatcgtcgagagggtagaggagcgtgtcgacaaggcgggctcatgcgcccggtcggtgtcgatgaggctcgagagggcgcccttcactcatgggtcgtcgggcaggccacgagcgaggtcccgtctgacaaccagttccttcccacaacgcagcccgagatcagacaaagcagtctaacggtgcggcagcctacgctggaacatctgaagctcccgggctgacgccgagacgagactcgctacagatggccgaggacgacccgctcgcacgtcggatcatcgaccttgaggccgagctcgccgccctcaaggtcgatgcccggcaacagcggcaggcgtccaagctgccccgaagggcacagacaggcctgccgatggagctcgaggagtacgtgggtggcccttctcgcttgattcaggaccatcgcgaccggccgaaccactgacgaggtccttctcccccgggcccctttacgcttctcgtcaaactcgtaggagcgctatggccgacagatgatcttgccaggtttgggcttgccaggtgagcaggcctctggtgctgtcacggctgcatgtcgccgcagactctcacggctgaccttgtctttatttcgcttatcacacctcgcagcccagctcaagctgcgcgacgctgccgtgctcctcgtcggcgccggtgccctcggctgccctgcgcttcagtacctcgccgcagccggcatcggtgcgtcctttaaagcaggtcttcatgcttagatccgcttcggctgacgcgccggctgcgatcggcaggccaaatcggcatcgttgaccacgacacggtctcgcgcagcaacctccatcgccaggtcctgcatagcgaggcgactatcggctccctcaaggtcgactcggccaaggctgccttgcaaaagtgcgggagggcatccaatacgccagtggatgatgcctgactgcctctgtgtggcctgctcgcaccagactgaatccgcacgtcgaaatcacgacctatgccgaggcgctctcacccccgaacgcgctccaaattctccgcgaatactcgctcgtcctcgactgcaccgaccggcctctgacgcgctacctcatctcggacgcctgcgtcctcgccggcaagccgctcgtctcgggcgcagcccttggcttcaacggtcagctcgccgtctacaactggggggccgagagcccttgctaccgctgtgtctggccacgtgttgcgaagcagccggctggtaagggaacttgcgaggaggagggcgtgcttggacctgttaccggcgtcatcggcacgctgatggcactcgaagcgatcaagattgtgaccggcctcgctcgtgggtcctcacgaggttgtttttgaagctctatcccgatgctgaatctctgcccttgacgccgatcagaaccggagccgacaccacccggcctgttaattctctccgctctctcgccagcctcgccgttccggacgttcaagctccggcgccggcagccgctctgccggtcgtgcgggtcgcctccgggcgactcgcccctcggtggtaaaattacgagccttgagctcgaggattacgacgccttttgcggcgggcctgtcatcgatcgggatcagagcgggctggaaggtgtctacgagcaaggtctcgctcggatcagcgctcaggtgcggacgcgctcttgcaacgaccgccgtgacctatccagctgactgacgatttctttcgtctgctaggatcttgcagcacgactggtgagctcagacgggcggcccaacctgatcgacgtccgcacggccgagcagttctcggtcatctccgtccctggcagccgaagtcagtcaccctctttcggtcgacgttctggattgagatacgtgctgaggcacttgctgcatccatcatcagacgtccctctggccgaatttctcgccagcccactcgaccatctcgtcccggacggaggcgaagcgaccgacgtcgtccttctctgccggcgtggcaacgactcgcaagaagcggcgctcgctttggctgaagctgcgcaacgggcagaaccaccgaggaagatcgctatcgtcgatgttcggggcggcgtcaagagttgggggagggccgtccatggtgggctcgagggtggctggccagaatactgagtcgggccgacgtgaaaatcacttgacgcgcccgtcctctgagaggtcgtccaccgtcctgctcgaggacttaggccgcctcccgcgtcctgtcctcctcggtgaggccagccggccctcgagcgatcactcgggcgtcagtaggccgaggtggctgtcgaacgcgcgcaggtcggcctttctcgcgcgcgacttttaaaacggccgatcggacggtggtttcgcccaaagcgggccaaatgagagtacgcagacgctctgttcctgattgatggtgcaccgatcctgcagggctcgcgagagagagcatcgacagggacgcagagctatctgcatccgaagtcagggctgctgcgcgggcgcccgcttcgctctgcagcctcattccgacgccgaccagaaggatgagcacttgacggacttcggagcatcgctggctgactacgacagagctcagccttggacatgctctgcccgtctccacctgctggccgagcgaccccactcgaggtgtggcaactggacgaccggcgcctgtctcctctagcttgattggcaactccgaccctgtcaatcgggcccccttggagcttctgacctcgacctttcccctgcagcactattcgaaggatgcctctagccacgtctctcgactgacctcgacgacaatatcgcactctcgcgcctcacattcttcccagtcgcgcaacgaccatcgaacgcgacgcatgacggaatccttcgtgacggctcagccggcgccggctcctcccatgagctccgcctccagcttcagagaccgtctccaccatatccagcagaagctgacgaccaaggagggccttgtcggcgactactcctacggccatctcgtgcgtcgaaggctgcagctgcgccttcagcttcgaccgcgccctcagacatgccgctgaccttgacggctgcgccctcccgcccgtcccgccagtgcctcccgtcgtggccgtattccttcggccggcgcaacaccgagcggcacacgcgcagactgccgccgttttactcgcttgaggccgacctgccggtcctgctgacagtacgtcgtgttcagcttgtatcggctggtcgggctggggcctgcttgcggcgccgctgctggctcagtagctgacggctagccgccactcgcatcctgactgatatatcctcctcctccccgtaggtcgtagccggcttccagcactcgctcgccatgctcgccggcgtcatcaccccgcccatcatttttgccaacgcgctcaacctcgcgcccgaggtccagtcgtactgatttcgtcgagcttgatcgcctctggcttcctgtcgatgatccagatgtcgcgcatccggcttccgattccctttgtcaagcgcgagctttaccttggtacaggtctcctcaccgtgtgcgccctccgatcacctacagcgtttgcatgaagtctgtcgttgctgaccgccctccctcgctcgactttgcatgcagggtcggcacgagcttcgtctcgctctcctccgccttttcaatcttcggcgcattctatcgcaacggccgctgcgagccgaattcgccttgtcctgaggcctggggcgcgctccttggcacgtcggcgctgtgctccctgacagagatcggcatgagcctcgttccggcgagggccctgcggcggcttttccccccggtcatcaccgtgagtgctcggcctatctgctgcacgttgaaacaaatctgactgtgctgccctgctcgtccacagggaacggtgatcttgcttatcggcgcttccttgatcggcgagagcggcttcttgagtacgtctgcgcgtcctgtgagaggctccggtctggtactcacgctgacatccgctggtgtcgcagactgggctggcggcagtaacgattgccatacgcgtcccgagaccggattcttcgccctttgtcccaatgtcatcgcgccaaaggccgctctctggggctcgccgcagttcctcggcctcggcttcttcagcttcatgacgatcatcctcgtcgaaatcttcggcagcccctttatgcgcaactcttcgatcgtgcgtgcagcgtgtcgactcttctcgatgtctttgcctgtccgactgaccgttatctctgtgcgtttcgtcagatcatcggcctcgcggtcggcatgatcggcgcgggcgcaggaggttacgtcgacggatccgccatcgccgcgagcccgaccatcaccttcgtctggcggacgacgttccccttgtccgtctacgcgccggccatcctgcccttcatgggcgtctacatcgctatcgctatggaggccatcggcgacatcaccgcgtcgagcgaggccagccgcgtcgaggtagaaggagtgagtcgccagtcgtaccgcagatgaccccctccccttttctctcgctcgacacagtgattgtttcctgacggctgcacgctttccacctgcccgcccgcaggccgaattcgatagccgcatccagggcggtgtcctcgccgacggcgttgccggccttctcagtgctctcctgaccgtctctccgatgagctgctacgcgcagaacaacggcgtcatatcgctcacacgatgcgccaaccggcgtgccggctacacctgcgccatgttcctcatcctatatggcatctttggcaagattgccggcgccttcctctcgatcccgaacccgatcctcgggggtgtgacgacctttctcttctctcaggtcgccgtgcgtctgtcctgccgcgcgcagtagtcgcgtgcaagattcgctgacccaaccttctacctctcaggtctcggggctcaaaatcttggccacctgcgactacacccgccgcaaccgcttcatcctcgcctcgtcactctgcttcggactcggcaacctcctcgttccagactgggcgatccacattgtgagtgttgcgcagggcgacaactttatggccgcccgtttgacgtctccggtccgtgcactcaacagtttgagggcgtcgagacgacgaatgcaggcctcctcggctttttcgacgcgatcatcatcattctatcgacgcccttcctcatctcggcgctcgtcggctgtctgctcaacgcgatcctgcccgacgaggtcgaggacgattcgacattggcccgcagcgatctcgtccatccagttcatccagacgacctgataggcccggccgcagacgagcgcgagctcatgcacgaggttgagctcgacgagaaaaaattggagcctggggccggcgcccatatctcgacgctcaggcgggaggtcgtctgacgccgcctccctcctcatcttttgccgactttatcgttgtagaccatcttggatgccccgacttgcctccgctcatcgtgttgcttgctagagcatcaaatcgtggcaggacattgcgatggtgttacaggtgcagtcggtcgttgcgagatgagtagaacgatggtgcacggcgcggcgaaatgacacagtcgccgatgggcggtgtacagggagtaaaaaggtacaggcacgggattcgaggcaggcgatccgctctctaggcgtacttggccatgaagtcattatggaacttctcgaggtctgacgagtactgctcgacgccagggctgagggccgtcgtccggaagtggacctggccgtcgacctgaccgaagccatcgccggggacgaggcagatgccggtgctctctgcaaagacgagcaggggatgcaagctgggtcagcgaatgatcccaagtttaccgtgcgagtgaacgctggcgcaccgaggagggcaaggcaatagaagaggtcgggcgactgctcggcctccttggcagcctcgatcgccttctctggcagctgcaggcgggggaagaggtacatggcgccctgggttgtcggaaaaggccagcgggtcagcgaattatccaactcgctgggcttaattgtaacgggacgcacctcggccttctggcagctcatgccgtcgagcttggcaaagcgctcgcccatgtagagacttcggtcgcgaagcgcattcttgatgccctcggtctcctcgcgccactggttgtagctcggtccgccctccttgggcggccggacgaggcagtcaacgccgatctggccagaggccggcgggcagaggccgacgctcgaaatcttattgatctgggtgaggacgtcctcgtcgatgttgacgagctccatgtagccgccccgccggccgcactcgcccgagtagcccttggagatcgagtggaacgagatgaggccgacatcggtcgcgtagggcccgcccatcgacgagagcacctttttgaacgagtggaacggcttgttctccttgtcaaagacattctcctggtagacctcgtcggcgagaagcacaatgttgttgtcgtagcagacgcggatgatggcttgcatgtcctcctccgacaggcagttgccggtcgggttgcccgggttgatgacgacgagcgccttgactggcatcttcttgtcggccgccgtcttgagcgcctcggcgacgctcgactcgtcaaacgaccagctcttttcctcgtcgagatagtagggcagcgggttggcctcgaccgaggcaatcgtcgcggtgtctgcatcggatcggagcggtcagcaaagggggtcaacagcgacgggacaggtccgcaaagcagactcacagagcgggtactgcgggatggggatgctgtgggcgtagagcgcttcgtcagttgggagagctcggccgcccccgaaacacaagataacatcgactcacaggacaccgtcgccggggcagatggcgacgttcataatgagcgagatgccggacgaggcaccggcggtcaggtagatgttgtcggcgttggcggcgtggccgtcgcgctctattcggatcggagcggaatcagcagctatccaagctcggggtaacgacgcgagcgactcactctcgagccagtcggcgacgttctgccggatgtaggcgtcgcccttgttagccgtgtaggcgccgaccgagcctatctcctcgcgcagctccttggcacggtcgatggcgtcctgcttgaagagctccgttgcgagcgggctgtcgagcaggtccgggtactccatgagcgaggcaatctgcggcgggcgactcacgtcgagtcagggcctgattgccgggtgtacgagggcgcgacaaacgccgacgtacctgccgccaccaggtaatgggcttctggtcgaggcccttctgctgggggttgccgatgttggcatagacaatcttgtcaaatggaagcgtgtcgcccttcgcgagctgctcggcgtacttggccgccttttgcgggacggcaccccgaacggcatactcgacctcgagcaccgacgggctaaacggagagtacacgcgcgcgtcggaggggaggtcggcagcaaggaggcagaacggtcagctcggggcgctctctaggcggcttctcccttatcgacctaggccagggcaagcaaaaggtgccctcgagcgaagcatcggacgaaccggagcgagtcgaccgtcaagggcgtccggcgcttggtcgacgacgggccggcggcctcgttcttggtctgctcgacctggcccttggcctggagagggatctgggacgcgttggcagcctttcgggacgacatggtgagggtggtggacagcaggcggcgcgagagcatgtcgggcggggcaaagggggggatcgatccggtgccggggcttatgatgcggtctcgctggcttgtgggtttgggtcgggcctacggtggaagttgtcggagccagcgtgcgggctgaaaactcgcactgcgccgcccgacggagttctccgcggtgccggccggcctcgctcggtcgaccgccaatcgcaccccccttgcgcttgcttccgttcgttgagcgcgcgatagcgaacgagagcaagcagggtctgatctattgcggaagaggaaaaggacaaaggaaacgaacgacaagagggcacaacagagtcgctttggggaagggctgtcgagtgcagacagagcgacgcagcctaacggcgcaggcggggtgcaccgcggcaggccggcgagcggggaagagtggcatgtgaccggacgaatggccgcgccaggcgaccttgtgagcgacgagatgtgcgggggcggtctgtccgactttgctcggccatagctgaccttgtcgtcgtctcagtcacgccgctcgtgcgcctcgccaccggcagcggctgcctcaggtttggcggcccggccctcttcgaggtcgtccatcgcgaccggcgcgtacgccggcgggggcgcggccgcctcttgcgatttggcatagacgtagaggcagctgcccatgatgatcgtcccgatcgagagtccgcgaccgctgccagaggggaggggccgtcaaggcggggtcagccagcgctcgaccccgagagggggggcagacgagcgaccaacccagtaatgatgtcgccgaagagccggacgccgacgatcgtctggatgacgccccgggcagccgagctgaccatgtggctgactgggctcgtcaccttgatgctcatgaagccggcgatgcaaatgaggaagccaaagagaccctgtcaagaggcgggtcagcgatagcgctgtcggtcagcgctgcccttgctttgcttgagccggtctcagcgagagggtcgcttaccgtcacagccgtgccccagagaaagcgccggagaaggtcgacttcggtccatgtccgcaggatctcggagccctcggcgcagaggatcgagatgggcagcatgacgacggccgagagcgcgttcgagtaccaagcgagggccatcgtcgagccgtcgacggccttgagcgagtccttgatgacgatggcgtggcaggccgtcgtgaccgagctcaggacgccaaacatgacgccgaggctgcaggtatcgcgtcagtccaaggtcatgaagcggtcgctcggccggtcgacgcacctgctgacactactcgcgccgccgccaaacatgacgccgatgaagaagccggcggtcacgcagccgcaggcggccagcgcgagcgaggtcggcagcttcttgtaggcgacgtaagtaatgatgacggtcaggggcaggaccagcccgcgagcgacctgccagaagacgcgcacatggtcagcctgctgcgtccatctctggttcgggcaaagcaaacagccacacctggtagaacgaggcgtcaacgtattggagcgtaaagttgttgactggcagtgaaagtacgagcgcaaggtcagcgtgtcgtgcagcatgtcgctctaagtgaagcgcacgggcgcacagcagaggccggtgacctgcgagggaacggaggctgtcagttcaaggcaggctatcggggcagatctcatcgaagtataataacgttaagcgcaatgagccgccagagcttcttgactgtgaccgtgttgaacctacggcgggcgaggatcggacggaagaggtcaacgtagggctctcaggctgggcgcagcaggccgagcggcccagtcagccgacctgcgcaaggaaggcgacgcacttcgggatgacaaagatgccaaagacgtggctgacgcagagcaggacgacggcgatcgagagctgggcaaagaggaagaagatgggaatcgagctcttgacgagaacctggcgaggttgacgaggcaggacgcggccggaaggcgtccgcaaggaggcaaaatcagcattcggctcgcaaccggcgtaggaacgacggcttgcggccggaatgcagcccagatgagcaagccagtacgcacatacttgttcgccgtcactgcgagcagcgtggcagcgcgtgagaggcggtcagggagggaggagttcgagagcggagggtagaaagtcagctaagactgccagcaaccagtcctgcgctgatcatgctcgtgagcgtgcccagcagcacagccacctcatccatgaaaaacagcgaggagcaaggagacgcacccatctggatcaggtaaatcgagacaagtcggtcacagaagagagagagtgagatcagcccagggttcgatggacaagtgagcaggagcccaaagccgaagagctcgtgccaaaggttgcgagcgacgcacgatgatgcccgacaccatgtagaacgagacggtcccgacgacgagcgccctcgagggctgggcttcggacgtgctcatctttgagatcagaggcgagagcgggaggggtcgagaagatggctggcaagaggcagcgagcgagccgtcgcgtccggccgtcaacttcgacagggccgcttggggccgctcgagtcgctggccggtgacccctctagcgcccacctcgccctcgctccaggtcccgcctgcttctagcagagctcgcaggccagcccgccagccgtcatgcccgttgcggcgccttcggacgaggtcaagccggccgtcggcttcgaccgccttccgcccgagctcctcccgctcatcctatcgcatctcgccgctccgaccgacctcttctcggcatcgctcgtcagcaagacctttgccgcctacgcgaccgagatcctctatgcgcacgtctgggtccggccctggcagaagggagctgatcgcaaggtgtgccttgtcgccctgcgcgtctccgcagtgtcgtcctgagcgccgctgaccatcgcatgcgacccctcctgcagctcagcctcctgctcgagacgctttcctcgaacggacgtctcgcccgacgtgtgcagcggctcgagatccggtcgtatccgccgccccagatgctaacgacgtcgctcgcagccaggacgcttctggcattcctcgccctgccgaacctcacctcgttcgccttcacgcgcgatcactcgctctcgccccagctcctccatgcggtcgcgacctgcatgccggcgctccaggagcttgagatcaacgcacactcgaccgggagctttgatccggtcagcctgctgcaaatcaagggcccgctcgtcaagctctcgcttctcatgcccgatcgacgcgtggtcggtgtcctcgaagagtggctccgggcgatccacgaagacggcgtgcgcgctggccgggagcgacctggccttcacgagctgacaatcctcagcaaggtgcgttgctccagcacctgtccgccagaggtgggcttgctgactgagactcgagcagttctcgccgctcgtcaacgattctcttctgcgcgcgctcgcgccgagcgtgccgcatcttcgttctctcagcctcaccgccagcacgcgagtcactgcggacggcatcttggaaatgctgcagaccgctgccggctcgacgaggaccgtcgtcgaaactggaaatgacggcgcgcggcgaaccgagcgcggggtcacccggctcgccctcgagtcgctcgaccatcttcgtctcgagcagctccagccacatctcgccggcgttgcacctgatctgaagtggctctcgatagctcactactcgccagtctcgggctcagcggacgatccatcggcctcacccacctacctcttcggcacgctcctaccaccattcgcccggacactcgagacgctccacgtcgcccggcctgggccggcgcccatcttgctctgcctaccacccggcggtttccctgctctcaagacgctctcgcttcctccgctgtcgaatgacgagctgccgacggatctgccccgtctgacgcctcggctggagcacctcttcctcgtctggcaccgccacctgctccaggatcttgcgatcattggccattggcgatctctacacaccctccatctcgtcgtcccgggcacctcggaagggacggcttgggagccaacgctccaggacctccgcgggctggcgcagatgtgctcgtctctccggcagatcggcttccgaacccgggtttacgacgttcggcactcgtgcttctggctccaggctcagaccgagtgcttatgctcttcacactctttcctctaggtccatcgcgttccgatccggtcgtttacgccaaggactgagggcagggaagaggtcgtgctcgagcggttcgacatggaggccggcggccgcgtccccgacgtctttcgtctcggccgcttccttggatgatgccatatcttctccgcctgccgtctggtcgtgaatttgggggacaaagtgagcgcgagagtacgcacgcgacccggagggaggagtggacgcgtgtttgtccaggacgaggcgcaggcaggcgcgtccatcaacagacgagctcctttctctccgaccacctctgccccttgccagacgctccctaggacccgcccttctctcgaggacggcatccagctctcgcccgctcgcttgccgccgtcaacccggaaggtccccctctagccggctgtgacgctcagccgaccgacggtcgcgcttgctttcctcctcagcacccagccagatcctttggctgcctgcggcaccgaagcttcagcgtcccacaaccggaccgcctcacagctctcatgctcccggcatcagccttctctgctggcctcctgccgtcctcgccgggctcgtccactggcggcttcggctcggacgacagccggggcggcggcggcggacccggggtcgacgacctgagcttgccctcgctcgccgactcattccacagcgacctcgagcgtcaccggctcccatcaggctcaggtggcggtgctggaataggcgacggctggggcagcatcgaaggggcccggttaggtgctgccgacgacgacgatgacggctgggaccggcatgggacgccgacgacggtcaggaagagccgtagtaggccgcgtgagtgctctttgctacccttcgtccaactcgaggacgtaaaagggagattgacgaggtttctgatctctcctagagcaccggtcgtcgtcaagctcgccctcacgctcgtcgacgagcatcatgacgcctctcgcagcggcgagcgccgtcgcgtacccgtcgtcctacgtcgacctcgacacgccccaggccgacaccgaccggcatcttcggcgaccggctggtgctccgatggaccgagccgacgagaactcgctctcgaacgcctcttcggcatcgtcgcgcgcgctgtcggacctgacagacgtcagcgctctcgacggagccggcgggaccgacgacgatctctttgctcagagcccgccgaaagccggaccttctgcttcgctgctcggaggctcgacgaacggtggcaagccaaggggcgggaggatgagtatcgccggcggcgagctcggcggctcgcgcatgggtcagagcctcacccttcgggagcaggagaaggtgcggcgccggtcaggaggtctgtacaccggcgcaagcactccaagctgaccactgcatcgttttcaaccgctcgtgcgctctaggcccttgaccagaaagaccgcgagatctttgacctcaagctcaagatccactttctcacgctccggctcgagcagcagtcgcctcagacgcactcggcgctcgaggatgagaacatgcagctcaaggtcgcctacggccggctcaaggccgagtgcaaaaagaacaagaagtactcgctcgagtgcgtcaaagtgatcgaagagctcaagcgcgagctcgagaatgctcgcgcgagcggcagctctgccggggctggcgggcttgcggcggcgcgggcggcgcgcgagcgggaagccgagctctcggacaaggtccgcgaggagaaggagcgtcggcgcgcgcttgaggaagaggtcgaacggctgcgagatcgggcagacaaggaggcccgccagctccgcgactcggaggtgcggtttcattgcccctctgagcctccctcgcttagggctgacctcaatcacctgctctacgaacgaccaggacgagattcagcgccttcagaaggccaacgccgagctcgagcaggaaaacgaggctgtccacgaccacgccgaggcggcaaaggacgagctccgacagacccaggaggagctcgaccgtcgagtcgacgagagcacgcggggcggccccggtgacaccgagtttgacgagctccagcgaagagcagaagagctcgaggacgtgagtggcggcatgcaccctgtgagggattgtcacgcgctgacatgccgcctgttttgcgctcgcaggatctcgaaacggcccacggccagctcgaggcgcagaagacgtcgatcgagacgctcagggacgagcgcgaggagctgctcgaagagcgcgacgacctgcacaagcagcttgatcgggccgaggcgggtgctggcggcgctttggaccggtcaatggctcggggcggcagtgaggagtctgagcgtgtgcgtaagagcgttcggaccacaccggagcgagtttcagctgacctagacactatcttatttcgcaggagcgcaacgagcttcgcgaccgactcgctgcggcaggcctcgagctcgagaagaaagagtcgatactcgaggagaaggagcgcgcgctcgaggaggcctacgccgagctggacggcgcagatcagcactgggtcgacgaggtcaaggtcaccaagtcgcagaatgaggagctgaaggatgtcagtctgcgaccgggcgtccgaatccacgcgtcgctgatccggtgatccctgtttgcgctcgctaggtcctccaagagtgcgagaaggagaacgaggcccttcgcgacgaggtctcggagctccggaacgagatagccgacctgcaggccaagctggccgagctcgaggatctaaacaccgagcttgcagaccggctcgaggagcacatgctgatccagcagaatgagaaggccgagcgggaggccgagctgcttgccaacaatgaggagattcaggccgtaagtcgccgaacgtcgtgaagctcatcatcggcgacggctgctgacgccctctcgcttccttggtgcagcttgccgcgcgcgttcaggagcttgaggacgaactccagggccatctcgccaaagaggtcgagctcgagcgcgagctcgacgcgcaggacgcccaaatcgaggacacgcactcgctccatgaccaggtcgtcatcaccttgaaggaggtccgtctggctgcggctcgtcgccatcatggcgagactgaccttcgcttggccaaccctcgacttcagaaacacgcgcagacaaagggcgacctggacgaggtcgtcgagctttacgcggccgctcagaaggacctcgagctcaaaaagtcgcaagtcaaggagctgtcggccctggccgccgacctcgagggtaagcagcggacggacagctcgcttaagcgccgcctgacggaggagcgcgaggagcttgtctcgaagctgcgcaaggtcgaggacgagaaggcgcgcgagacgagcggctggaagcgcgagctcgaggacagcgaggctcactggaagcgtcagcttcaggacaaggattcggtcggtcccctcgagatgcttgccgcgagtttcgtcgattgctgacatccctgtcgggcccaggtcatctcgcgactgacgctcgacgtcgagcgggcgcagactcgcctctcggagcgcgagcaggacctccaggccatgcaggacggcacgcgccgcctcggcgagacgcattcggaggaccgtttcgcactcgagcttgaagtcgagcgttaccggcgcgatctcgagcacgccgaggacgacctcgagcggacgcgcaaggacctcgagaagaaggaggccgccctcggccaacgcgaggatgcgctcgcaggcttggtgcgttcctgccccctaggccagcgtctgaggcacgagctgacacctgccgccgccgcctaccaactagcacgccgagatccgcgacgtcgaggcgaagctctcggccgaacggcagtcgaggctcaacgtttcggataagctggacagtgctcagcgggtgcgtcacgaccgccaatcgggccacagcgtcgcgctgaccctcctcccctctcctctctccagggcttccggaacgccgagcaagaggccaacggcctgcgcgagcgggtcgaggacctcgagcagcgcttgaccgatgaccaacgggcgttgctgacgacgcggacccaaagcgagactcagcgcaaggagagcagccagctactgctgaccgtctttcagaacctcaacaagattctcgggaccgatgtgagtcagacgtcgggcgtggcagggcttgactcagggtcagagctgaaccgagacgcctttccttgcaggaccgggcgacaccggctgccaactttggcatcttccgcgacacgctcctctcgcggctccggaccctcggccagctccagcacaactttgacaagaaggtcaaggcgtgcgagaccgtctttaccgagcgcctgacgtgcgttccccttgactcccttcgaagggatcctctggctgtccagcgctgataggcccacgcactcccctctcgcccgcagcggcatgaagaagcagctagatgccaaatggcggcagctcgaccattttgagacttcggtccgcaaggtcgagctcgtcaagacgcaatggcgcaacaagctcgcgcagaagcagggcgagctcgactcgctccaggctaaacacgccgacctggcggcccaactgagcggcgtcaagggcatgacgcgctccgagtcgacgtctgatgcgaaggcggcgaccacccggatcgcaacgctcgagcgccggctcaacaacgctctcaaccagatgtcgacttacgaggagaagctcgcgagcgcgcgaagcaagatgacggcggccgaggcgcgctgggacgtccgcgtgcgcgagtacgagaaccggctcaaggcggccgaggagaaggtcaaggccgagaagcaaggcggcaaggagcgcgctgcccagctcgacatgcaggtcgagtgcgtcggcgttcatccctgaagacagacatcggagcgctgatccctcgtctctcttcatcgtgtgcgctcgcagagatctcaagaagcaggtcgagatggccaagcggagggcagagaagctccagggcctcgtgccgtcaaacgctcgggcaagcgctcgctcttcgccgtagtccgcactccggttgcccttcttctctccgccaggaccgtcccctcccgcccgctagtctactcgccggcccgcttggccttcgtcgaccgccactttcagccttcgccctttgtcccccccctcttttcgacttagactctctgcatctcggccggatctgccctctctccccccgcccttcccctgtccgcacgctgcgggctcgattatcatccattaatgagcataccctttcgggtcgacaatgttgggcgagcgcagggccgccgcgagccgagcgtccatctacgttgcaacgaagggagcaagggagacgtcagctgacggaagggcctgaccatcgggcgaggagagggaactcacgtcgcgactcaggacgaggtaggcctttggcgcccccggcaggagctcctcgagctcgaccgacgactcgtcgagcctctcggccaagaccgccaggtccgccctcgccgccgcaggccactggccgtcgcggacggcctggacgtcgtcgacgaatgccggccacgaaggtacaaattggtcgattggcgagggttgcgggcgtgactgggcgaagcgcgagagtggggggaggaggtgcttgaagcgcgaggtgaagcgggcgtagtgctgctctagcaggcccgtcagaagcccgacggcggcctgcagcagcgattcgtgaacggcttgtcagcatcggcttggttgagtgcggcgcaagcgaagccggcgaacctcaaacttgagcgagcacactgctgcccacccggcggccaccttgacatgcctatccccgacgcctcgctcctcttcctcgacctcctccgctgcgccagccaagcgcgaccagaggccggcctccttcgcatacgccccgtggagcgcccaccagacgaacgcgaggtcggcgccatcgggtccgtagaggccgaggttgaagccggcgaggagcgagtgctcgacgagcagcagccggtggagctcgatcgcgagcgggaggttggcaaaagtcgtcacgagctcttcgggctgcgggccgggagggcgaggcgtcagatgcccgccattgaaaggaaggagaggagggaggaggacgcacgtagcgggcgagccggagccgcgcctggcagagcggaacgagcgacgcagcctgttcgagaccagataaatcagcgtgggaaacggagcgcagagccgagcgcgcggctgcggacggacctcctgatagagctcctcccactggagcgtgcccttgccggcgaggcgcttcgaccttggccggttctggccaaggttcatcgccgagttgacgaggaactggccgggcgcgcaaagttagcgagggcagcgcgtcgaggtggagaagcagacgggacacacgccatcgacccgctggcaaaagatgttgacggcgtcgctcagcttgcgcccgtcccagccgtcgcccctcatcggccggtcctcctcagccagctcgacgagctcgcgcaggacgcccgacggaacgccggcgacctcggcaaaaaagagcgacgagaggtggccgagcttggcaaagttgaagattgtgttttcgtcaggctgatagaagatcgactggaggggaagagggttcgcgccagggtaaggaagaggggagaagcgggttgagagttgaggggagagggaacgtacgagcatgagcgaccggatgaacgccgacgactggctcctcgccggcgtgacgccaagcaggtgaaagtagtcgagccagccaacgacgttccgccacccgccccctccatgcccattgtcccagatcgcatcggccacctcctctagacctgcgacgagctcggccatccgctcccatgcgtcggcctgccagtcagacccgaggtcgaccgtcgagagcgggacgtgcgcgacgagcttgcgcgagatggctgggtcgaacgccccgtgggcgggcgagtcgggcgcgagtgagggcgagggcgtcgagcgggctgctttgaggaggtgcggaaggaggccgagcgacgaaggccggaggggggaggagggcgcgtagacttcgagcagcgcgcggaggagcgtctggacggcgaggcgattcacgggcgaagcgagcggtcaacgtccggcgtccggcttgctgagcgaggaggcaacgcacagatcggaacgtcagtctcgcgaggagcgcgtcctgccacttcttctcgactgtcagcgggcgggcagatgggggcgtagtggtccgagcgtgagtcgtagcccgagcagcccgacaaggagcgggccgaaagaaagggcaaagacggaccgagctcggtcgccgcaagccagtcgacggcatcctcgagtgcagcgagcaaatcgagcgggtcgtcgtcgtctgcgagcgagaggccagacttgtcgcccatgaagtcttcgccctgacagcacgcacgcgcgcgagacgggacgaggtcgtgtcagcaagcgtaggaagcgcagcgtcgtacagtaccagcgtgcgggaccaggaaacgcacgtcgtacaagtttccgcgcatcagctcgtcccagacgacacccgtcgactttgctagccctacgagcccagcgcgaagcacaagcccgaggagttcgacaggccgctcccggcgctcggcatcactctgcgcggcaaagtgcggcgagtcggccagcgaggtcgagtcgaggagcgggaggtgaacggggaggaggtgaagcgcggtgtagatcgtttgcgacagggtgaggccggtgtggtaggccatctagcgagcgttccagaccgactcaagttagccctcgtctggcgggacccccgagaaaggcaccaggcgcacctcgcaagccatcgcccgatcgaggatccagcagacctcctcgggcaggagcggccgttttgggtcgaaggcgggcgccgggctgctgctgccagcgacggaggcgccagagtccatgcgagggtccatgactgcaggcagccgagcgaggatgtcagcccgggggtagcagtgggcttgcagcagcacaggcgaggaggagggaccgactctcgatggcattcatggcgtcctgcccatccgtgccgagcgagcgagctggttagctcgaacgactgcacgagcagccccgggggaaagacggaccatgaggttgaagtgcgggaggtggaccatctcgcccggctttaggccggcgacgccctgctcaaggagcggcctggcgtcaatgaagcgctttgaggagagcatgctgtcggagaagatgatggtcaggagggacggaggacgcgactcgtcttcctctccttaccctcacccgaccagcctctcctgctccctaatcatccccttggcggagagagagcgcatacagccatgtcgcacattgtcgccccgctcgacaagccttcgacctaccgcgactcgcagtcgtcggtgcgtgccgccgtcgttcgtcgtctctgcccaagcagctcacccctcccttctctcctgccccgctctagttcgaccggcagcgcgagcggtcgctcctcgcccagtcgacgacgctctacgtcggcaacctctcgttctatacgactgagcagcagatttacgaaagtcggcccttcagcctgggtcagaaggggcactggctgccttggatgacggctgacgccgctctgccttgacctgcgctcctctccctccctcgcctcctcgccagtgttcagccggtgcagcagcccgctcgacggtggcggcctaaagcgcattatcatgggcctcgaccggcacaacaagtccgtccctggtctcggaggggcaagggcaggcactcagctacgccggcctgaccgctgacgcctcaccgctctcctgctcctgctccgccctttccccccccccccttccgtcggttgacttggcttcgctcgtcccccttccaagctgacgacccttgcaacgaccggctggcggcgccagatctaccgccacccgagctgtctcgtcaagcaccgctggcagcactcgcccgcctggcaagaatcctcgaagttcctcgtctcgaagcaccagcaggtccagatgctcgaggccgcgacgatcctcgtccacctctcgcccggctcgctgccggaagacaagagcctgtggccggcggccgtctcgcccgcgagccatccgatgccgagcatctcgttcaacgactcgcggttcatctcgcgccaggggacggcgctctcgctctcgcagcagcagcgggcccagcagcagcagcagatgatcagtggaggagggacgcccggcagcagcagcagcagcagcggctcgcctctcccgccgatcggcgcctcgcagcagcagcagcagcagcagcagcaagccgtccggcaccccagccccggcggggcgagcaacgccagcggcgaagagacgtcggctgagggcggaagctcgcccccgagctcgctcgaggaggacggcgccgtcgatgacgacggagacctcgagatggactttggcgaggacgacgtccacccggcgctgacggttgcgccctcggcgacgacgacggctcgtcggcagcagctggtcgccgctcgtaagacgcggagcggcaaggtcgccggcccccaccagtacccgcccgtcgtcgtcgcgtccccgccgcagctcgcaggcgcacgcaggacgtcgttcggcgcggtgacggccgtcatgggctcgctcgcgctcgggtcgtccgtcccaaaggcgtcgtcgccactgacccagccgagctcgttcggccagcagccgtcgctgggggggccgagcagctttgccccggggagctatcacagcggcgggcttggaacgcccgggagcttccacagcagtgtagcggctggggggacgcccggcagctactcgccccactacgctgccctcggctccttcctccactcgccgccgccgccgtcggccttcgcggccggctcgctcgcccggtccttctcgggcccgaattcgtttggcgctcagccgtcctactcgccctactcgacctcgcccgctctcccgcatccgtcgagctcgctccgcggcggtgggggcgcagggtcgtacggccgcggccgcggcggcggcgcctttgacccggacgccgatgaggacgacgacgacgacgaggaagacgacccgcgcgcgcgcggccagtcgtcgccctacccgcccgcaaacgccagctgcttccacggcgtcgtcgaggaggaagaggacgaaggccccggcggcgccggcggcggcgacgacggcagcagcagcagccggcggccggccaaggagggcagcggcgagcgcgacgacgtctttgccatggacgacatggagctctgagttcccttcgccgtcgtcgtcgtcggtcgtcgccctctcctctcccctctctcttcggacaacccatcttcgaacaaccctgcctccccgcccctcaccccttccttctggtcaacccaacgacgacaacactccctccgctctacaagctcccgcaaacgcccttcgctgctgcctcttgccgaatctgccaccttgcttgcatcacatcgccctccttctcgctcgctcgctcgctcacaacacacgcgcatcctccttcctcaacctcccctcgcaccgtcccattcgctctcaactcgttgtacagatcccaacgctcgatgactcccgacccggcacccctccttctccctagcacagacccgatcacccgtccctttcctttgtaaccccgtccgcccgtcttacgcagtcgttttgcgcctcgtacgctcgactgtcatcttgaaggcgggagtgatcgagggcggcgcttgggagagcccatgcagagcctctaggcaaaatgtccaggcgcctcgcgaggccggctcagcactcgcatcacctcgcgaccagacctagacggcgggcgcccagccccgtccgcttggagcgacccaatcactctccccaactcgccgcgcgcgcgctgagaggccgcccgagagagttacacgaatgcacaagaggggtggcagcaaatcaaacgagcaagagcagggaagcaagaggcatgacgagaagaaaggagccaaggcaggcggcgaaggagcgccagaggcgctagacaaacggcgctgctctggctagaagttgagagggaaaatggcctcaagtagccggtcttggcaaagattaaaggagggtcgaggcgttacgagttctggtctgcaacggccagagatggtcagctgcgggtccatcgcccctggcgagtacaagctggcgcggccaacccttcctcgcctgctcggaggtcatcgagccgcgtgaccgtctccctgggaaggtgctttgagggcctcgccagctgagctctcgcatcgctctgcttgcggaccgacagatcatacactcctctctcgaagctttcgcgcagcgcgccagaaagcggaaacgatccgttggctgcgccggcgacgatcagttcgacgatggccttccgccggcgacgaggctcagctcggcgcgcaggaggtgggtccggatcgaccgcggagcgtgcgctttgacgaggtcgtcgagcctcggaacgagctcttggaggcaagcgaacgaccgcgggcggcgcttcgttccttctctttcaaactctagtaggcccgtggcgttagccgtgtcaaaagcttagcgaaccgcctcggtcgcttctcactcggcggcggctgtagtccacgaccacttctggagcttgtcctcaaaaggaccgcctcgtctgtcgcgcaaagagacgagtcagctcagattcggccagcagcgatggggaaaatggagacagacgccagcgctgggtccatagagccagcccttgccggatgccgttgtccgcctcgtctcgctcgataaccgagatcgttttctgcgagagcagttgcgagaggctgcccgggaagcatgccgcgcaagaggcccagagctcggagactccagcaggagtcgctcgtccggttcctcattgccaggacctgctcgagatggagcgacaatgcctttgtcgtctcagggagggtcgaccggggtttggggagcaggccaatctcgtggagccggcccagattggccaggacggaagcgagtccggggaagctgttgatgtatctaaaggtgaacttgcggcttagcgtcctgtcactgctggcgaggttggacgtggccctgtgaatcaggtcggcgtccgcccgtgaccggctgaccgtgcggcggaagcagacggctgatgactttgtgaaagtgactaggcaccgactggtgggtatctccgatccagaatgatgtcgaggggcagacaatggggcatcagtggcacgagcgttctcccgaccgaacctctcccgatgctgacggaggtcctcccaggtcgtcggccacttctctggcttcgtcagtgtcacatccgtagctgggcatcggtcagctcccgagtctggggacgagctctctggagagactggcgagaggacgcagtcggcttagttctctacttgagccctgatggcggcagccccgcgccctttgacggcggaaaaatccggctggctgtcaaaagagacggtctcagtctttcgcaatcttcctatctaagcgattgctgctgagaacgagcacgtacgtcttgcgccgaggtcaaaggggcggctgtctgcggcggctgcggcgctgacttgggtggcacctcaggggtcgtcttcggggcctcgctgaacacaggcgcatcctgcgagcggctggtcgatgaagcgacctgcccgaggaggctgctctcgcgtacgaggactgctcgagtgaggcgagaggcggtcaacatgggcgagcgatcggaagatcctttgcgcgagagggtagggcaagccgcggcggaggtcggtagtagtcctttcaaagctacgcaggagtgcagctggcagctcgccgtcagccatcagggctcgcaggccagccgacaagcttgctaatcacgatatgctggctggtagtgggccacgagggagcgaggtgcggccgaacgcggagttgcgacgacaaaaggggtgctgacctaggaagggcaaggcatcagcacccagagccgtctcgagcactaagaatgccggcaacgagctgagcccacgctagataggccgctcaccctttctgcgcttgttagagttgtcgagagagggcggcgatgctggcgacgatgggggtcggagagcttgcgccgtcatcctcgtcgagctcggcctaccgcctcctgccctccgtaccaccaccagctactacgactcgagctcctctcatacttccttgacagacgtccgacacggtcgacgccatagcgagcatgaacgcctctgcgtcagccagcgagtctccccaggcggtactgtcgtttgtcacgcttgtcctcgagcacgtccagcaggcattcaacgcgtaagcttcctccctcgtcccttgccgaaggatgccgctggcatcaggcgacactccgccatgctgcagacatgctgaccgggaccttgcctctgccgaaccatgtcgcgccattcctgtcccgtcatccggcctgccgcgcccttcgcagcatcccgggctcgaccatcctcctgcgctacatccgcaactcgcatcagaacgacccgtggcggacggtctttgagctcctgctttttgcctttgccgtccggaccgtcttcagcagccgaacccggacggaccaggcctccaagaactttgtcaagctctcggagaaggtacgtcgggtctctcacgctctcgctccgcctcgatcgctcctggccgatggtcgggcgactgacgtctgctctgcctggccgtcccttctgtaggagatcgacgagctcgtcgaggactggacgcccgagcctctggtcgcaccccggccagtcctgacatcggacgagaacacgctcgagaccctgcccgtcatcctcggcccgaccggcgcgcgcgtcaagctcgcggccaacccgagcaagcaggtcctcaacctcgccagcgccaactttaccggcctcgctgaggacgagcgcatgaaggagagcgctctcggcgcgctccgcaagtacggcgtcggatcgtgcggtccgcctggcttctacggcaccttcggtgcgttctgttgctcctcgagacgcgggcgcctgctcgcgcctgctcgtcacgcgggcacgcgtgggcgccagatatctgctcgagtctacttcgctgacagtcctctgatcgatatgccgacagacgtccaccagcagctcgagcgcaacctggcctccttcctcggccagccgagcgccatcatctacgcccagtccttctcgtgcatctcgtccgtcatcccggcctttgccaagcggtcggacgtgctcgtcatcgacaggggctgcaactttgccatcatgaagggtgccgaggtctcacggtccaagatcgtctactacgagcacggcgtgcgtctggagtgccttgtcgagcgctgcctgtgtcccctgcgctgacaggctcccacccctcgaaccccgcaggacatgtcgtcgctcgagcaggcgctgacgaccgtcgtccgtgacgcgaaccgcaagggtggcaagctcacgcggcgctttattgtcaccgagggtctcttcgaggctgacggttggatctcggaccttgaaaagctcgtgcgtcgacctggttcttgggttcaagagccgaactcagcctttgctgacttcgcgtaatgttgccacgccacaggttgagctcaagaagaagtacaagttccggctgatcctcgacgagagccagtcgttcggcacgctcggcgcctctggccgcggtctgaccgagctgtcgggcgttccggtgcgtcgggctttggtttctgtgcatgacctcggctcgaggctgactgcgtgctgcccttttcctcaggcgaccgaggtcgacatgctcatcggctcgatggccaacacgctcaatgctggtggaggcttctgcgcgggctcaaaggtcgtcacggagcatcaggtgcgtcccgcccggctgcccgctgcctccgcataaaccgctgacttcgagagttatcttctacagcgcatcaactcggccgcctatgtctattcggctgctctgccgacgatgctcgccacgacggcctcgaccgccctgacgatcctcgagtcgagcccgcagctcttcacgacgctcgagtcgcacatgtcgctcctgcggtcgacactcgacccgcttgaggccatccacatcccttcccacccgctctcgcccttggttcacatccagctcgccgactcgccgccgacgtcgatgggcgagatcgaggccgaggaggctctcctgcaggaagttgtcgacgaggtgctgcgcaacggcgtgctcgtcacgcgcgcccgccgactgagaggccaggagcgcttcgagattcggccgagtatcaaggtctgcctgacaagcgccctgacgcgcaaggaggtcgagaaggcagccggcgtgctgaaggccgccctcgccaaggtactcaagaagcgctcctagagcgcggctctcgactaaactctctgtacgcttcactccgaccacttttgatgatgcgacgtcgtcttgttgagtgcatggcatcgcctcagccctgcgactcctcggcgccgtaggcgttgctcttgtgcttcgggttgaagagaaagtctgcgggcgacgggccgaggaacatctcgctgagcttgacccagtcctaagggcggtgagaaggttggtcagctttccgcgcacgcggacggcgacagggtcggtcaacgcaccctgctgtctgtcgacgcaagcagcgtctcgagctcgttgcggcctttgtacggcgccggccggtcgttgatgttgaccggctgcgtctcgagcagaccgatcgggatgtagcggtggctggcgccaaggagcggccctccagggcgtcagctcgagtggcgagaacgccaaacagggggagacgtacgtgaacgacaggtactcgcagaggaagcgccgggtcgtgttgacgccctgcgtgtcggatccccagtgcgtctggaaatgggcggggcgaaatcagcgtagtcttcgctcgagcctctgcgagctccacggggacttgggatggcgacgaaggacacacgagaccgaactcggcgtactgggagcaggaggaatcaagaaaataaggtcaggtggtgaatcaggcgagggagcgcgtgacacctgacgcacctgccggatgaagtcgagtcgctctcgagacgagatgtccctgtcacaagtatggaaggatgagcgtcagactgtgctctagagcttagctgatcgttagccgaccacgaccgaccattcgcgcttctcttgaatctcggtgaagatccaagctgtaggtcgagcaggggtgagaatgaggtcagcggaggttgtcgggtaacaatagaatggaggaagatcgacgcttgatgagggcaccgctgaggaagcgcatgcagcaggagcaggaagaatgagcccgcgtactcgaaacggggtcaacaagcagaaggcgcaccgcgcgatcatgatgccgtcgacgccagagacgtccatcgacgtcttgtagtgcgagtagctgtagcagtctcctccgccgaagatctgtgagagagaagcccctcaagatgtcagccaatccggctactttcgcagccgagcgtcgagggaccgacagggatgggtgggactgtgagggttgaaggttgcgtcagtcagcatgggctagacaggcgcgaggccaagacgtagactgacggtttgcgtcctcgaccgtctcgcggaggacatcgacgcagttctacagccgggcgaaaagcagctgatcagtcgcgagcctgtggcggttggcatccaccgccagcgcaccttgatgtactgccagttcgcaaggcgcgagtagcgctgctggcgcgaccggccgtggatcgtgagcgcaccggcggaccactccttgacgaagcggggcacgagcttgtgcgcgttcgggctgttgtcgtggatgccggtccgctgcggtcaagatgctcagcggttagtgagcaaggacacagtggcacagaaacgaaggatcaagcgcaccatcttgaccgtcattggcacctcgccgagcgcgcgcgacatgcccgtcaggattttgccgagcttggtcgggttgcccatcagcgcgctgcctgcgcccgagttgaagactgcagttgaggtggcagcgggtcagccagcggcagccacgagcaagtcaaggcttgcagcgcaccgaggtcaatcgggcagccgatgttgcagtcgacgaagtcgacgtccgggcactcttttgcgatgatctcggcggctgaggccatctggccaggctggagagcgacggtacagtgtcaggtatgtagagaacctcagcaatggccagatgcagaagctcaccttcgagccgcagatctggacgccgaacatcttttccgactcgtgccgcttcgtcaagctctgattttggcgtgagcgttagacgtggtcagctcgcgtgctaggttcaagacgcggccgagtcaccgactcacccactcgcccttgccaccagagacgagagaggacgccagcgccatctcgccgcaggtgatctcagcaccgagcgaggccgcgagccgtcggaagggcaggttgcctgcggcgggtgagcgacgagcagtcggtgtcagcggagcagaaagctacgggaatgcatgcgcggatccgtcgcacccgtcgtcgtcaagggtgcctacgagaaagacggaaaggcagctcaaggtgagcaggcgctcttggactgcgcgagcagcgcacagacgcaccaggtatggcttgcccgtccagttgagtcgccgcttctccgtcgccttcaacgggacgtcatcagcgtcccggtcggcctcggttttgctctgcgcgatgacgtcggcctcggtgacgccgttggcgatgtcttcctccgagaggtgcactttgggcttcggtgctccctccatcgtggcgacataggcgttggcgatcgggaactcgtactgcgcaggagggttggtcagggacgtcaagagatagcaatcaaggagtcgggactgacccgcttgcggctgagttgcttgagcgtcgttgccgacaggccgttcgtctcgcccttggggccgcccttgcgagcctcggacgccgccttgcgcccctcgttgactgcgagcgagccgacggtcgccggcgcgaccggccgcgtgtagtgcgcggcgaggaagcggcacttgtagccctgagggcagaagccgagctcctcgaacgtcgggcaacggacggcgagcagctgctcggccgtcacgaacggcgctgagtcggcataggcgccgggtgtagggataataaagtcctcgggcttgctcgagaggtagagctcgacggagtgcgacatgcggcagctgagaaggggcaggtgtcagcttgggtcagccgccaggcctgcgtgttcaagtgggcggcgcagcgtacgcacttgtcgccgaaagcgcagggccggccgttggcgacgttcgggcagagctggacgtcgtccctggagcaggtcgacaagcgaatatcagtccacgatcaagaagcgctgctccccgcaggccttacttgaggttggcgaacttgcggcctttgttctggccgccgccccgcttggccttgccgctctcgccgcgaggggtcttgagctcacgctcgtcgagggcgtcggtcccgtcctcgcgggtcgcccgcttgagcgacttgcccgagccctcggccgcatcgtcgtcggtcgcggccggagcggttgctgacggctgggagcgagggatgatgtacctgtcgcaagcggccaggtcggggaggggtggggggtcagggagggcagcttgtcggatcgtcacggctgagcccgcggccgggtagcacgcacttggccttgatgggagcatagccctgccgccgggtatcgacagcaggcgtcggagcaggcacggtcgtcgacatggtggcgatacagagcggtcgtggtaaggggagcaggcgggaagcgcagctgagcccgacggacagacgagggccgacacctgcctgcaccgtcgccactcgccctcctcgacgtcttccttttgagttcgctgacggtctatgatttgcgctttctcaagacggtctgcaggacccactatcaagacagagcaggcagcaggacctgcacgacaagggcagacgactcgctccttgcccaaccctccagccgaccctcccgccctcctttccgcgcgcccggggtacagtcttgcagaatcatgtcgataacccaaggggtttagaccgaggtcagcgccgggccctccgtgaaggtcttggtgccggcgaccttctcgccagtctcggcgtcgacgttgccgtggagctcaaagagcttcgacgagtcgtaccggggcgccttgaggatcttggccttgcgaaccataacgttcgaaaggggatagatgccgcgggtggccttctcgatctcacggcccatcgactcgggaacgaacttctggacgagcctgcagagggcgggccaagtgtaggagagtcagcgggtgctcctcgccgagatgcaagacgcagcggacgcactccttgaggtcgcccgacgaagcctcgcgggtcatgatctcgaccatcttggcccggatctcgcggatctgcgaggactgggcgtaggtggtgcgcttgacctgtccagggcgcttcttggtgaagccgatggcaaaaagccggacgaggtagccgtcggtcgtcttgacgtcgacctggccctcgatcagcgactgccacttcttgacgagcgaccgcaggcggtcggtcgtgatgtccatgccgtggaagttggtgaggcagttcttgccctggatctcgtcgacccggagcttgatgttgcggaacgcctgctcctcgtccttgttgaggtcggcgagcgagagctcaaggatccggcccttcagcgagtcgttggcgttcttgagaccagcagagcggttaacaagcgtcttgccgacgttgcggacctcgaacatcgagggcgccttgatgtcgtaccattctgcacgagagagtggcgggcggttagaggaggcctcccgggcgacacaggagcgagcgaggacgtacccttgcgggtgaaagggtcaatgacctttttcttgatacccttcttgccctttgagagacgcttgttctgttggtcggaagcgagcggtcgaggtcagtctcccgagcagccgagcagagacggaccgcagaggtcaaacgaggggtcggcagcagcagcaacacccctggcggcggcaagcacccgagctgcacgcagcacgaccacgctcctccggcgacgcctgccaattagtgggcagagggtgcggggcaacggcgagaggcagcgccaagcgtcgtcggcagcccgcccatgccctccgccgccaaggctgcagccttcctgcgcgcggcctgcacctcctcatgcccggtaagttccccggcctcgacccgcgtgctccagccatcgcccgctcgtgctgctgctgctggtggggaggacaaggaacgaaccttgccgacagccattcttgactagattcgtggccgaggcggacgcgagagcacgagttgggggtgaaagcacgaggcagggtgcaaggcaggcagcggcgagacgagcgtcgggaccggaccagagagacgggacaaacgggaggaacgagcgagaggataggtgtcagtggcgacgtccgagggcgtgtctgtagtgctgttggaaacgaacaggttgggttgacttgttactggaggaacgagtgggggacgaagagagctctcggccggctgctcggccaacccagggcgcgcaggcggcggcggcggcggcggcggtcgcgcgcggggagatacttagaaaaaaaaaggttaggacttcgatcgcacgttgttgagggtcggtttcgacgtaaagcagccagaaatgagcccacaaggcaacgaaggccagctcagacaagcaaggagggaaagaggtaggaccggacgctgtcattgccccttcctgagaagtagcgtcgagaacggctggacaacccgtgctgttggaccgttcagaggggctcaaggcggcggcgacggcaaagcgcagggcagcgagccagcgaccgacgcaaactgctcaccatcaatcgactctcgcagaccttcactgacagcgagacactgacattacgatcaaacaaggcagacgaggttgtatcgaactttgtgcgcccaagcgacacggtcgaacaagtgggagggatggccaggccagcgcgcacagggacgagcgtggcatgcaaagaggggcgacaggcctgccaaaggatcttcgcacggcctcaaagacaacgcatggcaggggtacaactctttgacgggacatcgtccgcggcgacgtacagcaaggacgtgcgcaagcctcacctacattgcgatgtcgtctcgtctgcttaaaagaccgtcgcccgggtaaccaccaacgcacgacaggccgctcctggccggcggtcgtcactgcaacccatcctgacctactctatccttaggcgcttcgctgcgccgagcgtttgagggcgtcagccgggcggcctacgacctattgctcgtgcgacgaagctcgacgttgtccctctgcgcgcgggctgtccaccagccttcgcaacctgcctcttgaagcgccctcgatgtcatggcctctgcctcctcaaccacatatttgcaccctttatgcgcattgggcgtcgctgcacgtcagtatcactgaacggagggaccgagcggggggaggagtgccgcccgttcgctcttaatctcagcctggaagccatccccttcctccacgtctgctcgagagtcgagtccaccgagtccgacctgccgacgacgagcaagggcgctgctcccttgcgcgcgactttgcggggcctcggacgtcactgcgcgcgttactgcgcgactgggccttttgttaaccgattcgggaaagccgtgagaaaaggggctggtagccagacaaaagggagcgcgccccggctggaacaccgacgccgacggtcccttcaccatgaccccaccgccatcggccggaaggtcggacaggcagggagggagggaggggagactgcgggccggcgttggctgacgtcgaccaccgacctgcccttgctcctcctcatgtcgtcttcgtccaggcggtcgtcacagcgctcgcaccagcgcagccagctgtcgatctcgagcccgctcccttcggccggctcggacagacccctgccgtatctcgcctacccaatcacgccgttcgacgagcccccgccatcgtcgtcgacccagcggacgtcgttccagaccgagcttgcctcgctgccgccgacactagcgacgccggcgagttttagccagcagcagcagcaacctgcaacccagctggacaacctgtcggcctccccgctgccgtcatcaccaccggcatggtcgccgcccaagccgtcggtccggctcctgttcaagtacacgacgcgccgcgatctcgtcgtcctcatgctgccggcggccctcatctcgctcgcgtcgggcctcctgacaccgtacatgacgcaggtcgtcggcgactcgttcaactcgtttgcctcgttcccgctcgacgtcacgctcgcgaccgacgcgcagcggtccgatctcaaggccgacatccggatcgcctcgctctcgctcctcgcaatgggcgtcggcatgatcgcccttaacacgctcatggccgggatgtgggtgacggtcggcgagcgcaatgcccggcacatccggcgcgaggtctttgagaaggtcgcgagccgcgacctgacctggttcgacctcggcatgggcatcgccgacggtggcgacgaggtcgccaaggagaaaggcgagggcgtcggcgctgccgggctcatgtccaagttcactcggtgagccgccccctacaggtctcagagtctgagcgcgcatgagctgaccgtcagcctgcgccgtgccccactccagcgaaacggacgaggttcgcatcgcaacctcgcagaacatcggcgtcttcctcggcaacctcgtcacctgcgtcgcctgcctcgtcctcgccctcgtccggtcttggtcgctcgcactcgtcatcctcgccgccgtcccgctcgtcgtcattgcccagggcgtcgtctcgcacgtgacgtacccttacctgtcgtccgaacggaggatcctcgctgaggcctcgaccaaggccgagcgggccgtctcgtcgatcgcgacggtcaaggccttcaacgcgcaaaagaaggagctcgccgcttttgacgcgatcgtcgaggagggccggcgcgtccttatcaagctcaccaacgtctggggcgccaacctcggcctctcggccgtcgttctcagctcgatgtttgttgcctcgttctggtttggctccaagctcgtccgcgagggcgagctgagccctggcgacgtcatgaccgtcttctttgcggccgtcctcggctgcaacacgctccagacgctcatgccgatgatcgagcacatccagaagggcatggcagccatggcctccctccaggccatcatcgagcccccaccggcgccggtcatcgacctccggccgctctcggcggcactcaagctggacggcaagcagcggcccttctcatcgtcgtcgtctgcgacggccacctctccgacggccgatcagcttctgctgaaccctactcgatgcggctccatcggtaccggcctctcggcctcgccctcgcagacggctttcgcgaccgctcagcctctgccgggacgcaaggtgcgcaagatgggcaccctccgcaacatccggccgcccaggtgccacggcgagttcgttcttcggaatattacttttgcctacccttcgcggccgcgcgtgccgacgctccaggacgtcaacgtcttcctgccatcgggcgagatgacattcatcgtcggcggctcgggctctggcaagtcgacaatcgcccagctcttgctcaagctctaccagccctcggccgggactatcacgatggacgatcaggacatcaccgtcctcgacgacaagtggatgaaggaaaataccgcctcggttcagcagggctgcgtcctgttcgacatgaccgttcaccagaacgtcgcgatcggtctcgccggttcgggtatccgccagccggacgacgcgacgcgcgaggaggtcgtcgaggcctgcacaaaggccctcatccacgactttgtcatgggcctgcccgacggctacgacacgaagctcggcgtctcgggcgcaagtctcagcggtggccagcggcagcgtatggcgatcgcacgcgccgtcctgcgcgacccgtcggtgctcatcctcggtgtgtcgtctcgcgcagtcgcatgtgaacgcatcgtcaccctctctgactcaccgcctccgccgttgatcgccttgcagacgaggccacctcggccctcgacccgacctcgcgcgtgctcgtcttcgaggccatcaagctctggcggaagaaccggacgacgatcgtcatcacacacgacctgtcgcagattgtcgacagcgactttgtctactgcctcaaggacggcgccgtcgttgaagagggcttccggtccgatctcgccaagctcggcggcgtcttctcacgaatggccgacgagcagagcagccagccgcttccggtcaaggctgagctcagctgggacgacggcgaggaagtcctcgacgccatgctcgacgacgagagcgaggaggacgaccgccagcggacggcgtttggcctcggcctgcccagcgctctactgaccagcaagcggtcaagtgggtcgtactttgacatcctcgctagttgcagcaagaacgccgcccggcagtcgcaccggtcctcgctcaactcggccatcgatagcgcgctcgacttgccgtcagatggcaatacgccgagctggctggtgccctctcggcctataactctgcgcaagtcgtcgcgcgagtcaacgctgtcgccggcctttgcgctcgcgagcagccggcattcgtcattccggttgtcgcgggcgccgccgataccgtctccgtccgagctgccatactgctcttcggcatggacgtcgacgatctttggcaacgactcgacgggcgatctcaaggcccgaggagaggcggccttggaccggcgggcaggccttctctatcctggctctcgtgtcgaccgcgccgttgagcaggccaagctcgaagtcatcgcctgcgaggagaaggcccggatcgacgacgctgtcagcgagacgttccagcagaacctcgtcctcgtcatcggccgttgcctccgcagcgcgccgatgaagccggtcctcggactcgccttcctcctcaccatcggccatggcatcatcactcccgtctggtccaagtacatctcgcagctaatggccctcgtcgccacaggcggccaggaccaggacgagcttctgacaaattcgctcatcgtcatcggcctctcgctcgccgacgggctctgcatcggcctctcgtacgcctgctttgactgggtcgcctaccgctggatcacaaaccttcgctcgcgctgctttgcgaccatcatcggccaggacaaggcctggttcgaccattcgcaaaacagcccggccgccctcatcaacattctcatcaaggacgccgacgacatgatccccatcatcaccaatattcccggcgacttctttacagcggttgccatgatttcgttcggaattctctgggccgtcgccatcggctggaagctcaccctgatcggcgtctcggtcgtgcccgtctttatcggtgccatcggcttccaattcgtcatccttaatcggaccgagatccgcaacaagcggatgcgcgaggagattgccaaagtcttctacgaggtgagccgcgttctgccggtcatcgcagtgttgcctccctgctgacttgcgcactcgtcgcagaccgttttcaacatccgtgcggtccgggcgatggccctcgagtcggtctttgacgccaagttcaatgccgccctccgcgtcacgtactcgaccggtctccgcggcgcctggattcagggtctcggtaacggcctcatgaacggcctcgtctacttcgtcgagggtcagtattgatcgtctcctgtcgacgtgcgctgccgtcgctgacgctcgcacatccctcaccttcagccctgctcttctttgtcatcgccgtcctcatgtgcgagggctcctacacgtatgcccgcgcgctccaggtttttgcgctcgtcatcttctcgctcacattcggcgcgcagatgctgtcgttccgtacgtctctcgcaccgtcctttgataagtcgctcttcttctcacgccgccttgctctcaacccagtgcccacagtcgccaaggccaagcgcgcggcggtcgactttgagcggctcatccagctggccgacaaagaggtcctcgaggcaaagggcgacctccggccgcccgtctcgggttgcatctcgtactcggacgttcactttgcctacccgtcgcggcctgacgtccccgtcctctccggcgtcagctttgacgttaagccgggtgagtttgtcgccatcgtgggcggctcgggctcgggcaagtcgacaatcgtgacgctcctccagagactctacgagccgacgtcgggcacgatccggctcgaccggcatgcgctcgcgagcgccgacgccagctggctccgcgagcatatctctgttgtgtcgcagcaaccggcgctgtttgacatatcggtcgccgacaacattgcctatggctcggccaacgtaccgtttgccgagattgagcgcgcgtgcaaggccgcccaggtccacgactttatcctcagcctgccccagggataccagacgaacctcggcgagaacgcctcgctcatctcgggcggccaggcccagcggttgcagattgcccggacgctcgtcaagcgggccgacatcctgtgcgttcccatccgcaagcgccccggtcgcttcaggctgatccacttactcttgcccttttccagcatcctcgacgagtgcacatcggccctcgacccggacaacgaggccgccgtcctcgagacgatcatgcgcgtccggatggaccggaccgtgctcatggtgacgcacaagctgccggcaatgaagctcgtgagtcgtgctggctgctgccctatctgcccaaatcacctggcgctgacggacgagaatgaccctttcgcgtgacacggcagtgctcgcgcatcctcgtcgtcgccgatgggaagatcgtcgaagacggcgcgtacgacgtacgtcctcgctctcgcgtagtcttacctctggtccctctgctgaccctgatccgaccgctgcaggacctgattgcgcgcaggggcgtctttgccgagctcgcccggggcggcgcctgggaatgatgacgtgccgcccgacctcctctctcacatctgacgacgacacttgatgacccggacggcctcccttcctgtgtcctcctcttgtcctatcttcttccgggcgcgatctttgaatgacattggacatgcatatgtgcctaagttgcgagagggagcgagagagatgcgcgaaagaagagaggaggaagcgaagagtgccgtacagtgcgcgaggaaaaagggatatctagaggagggagcaggacttaggccgaggcgctcagcggctgggccgtgtgcgacgagccctgctgctcggcgtcggggtcgagcgaaatcttgtaggccttgtcgtggaaggctcgcgagcactgcacaggcaagaaggagggtgtcagcgcctcgaacgattcaccgcgaagtctcgatctcggcgacgcacctgagccatcgtgacggacgagcgcgagacgacgtcggtttggtagaagttcttgacggggagcgcgagcttctcggccgcatcggccttgctgcccttgagctgctttgcgaggctcgcaaagccgacctgagcgagctcggccgaagccggctcaatcgtgtcgtaccggcagagcgtcggcgaaatctcccacatgcggtcccggagctgcatcgcgtcctcgtacggcagcggggcgtgaacgacctcggagagggcccggaggatcttccagtcctcgcgcgcggcgccggggggcgggacggccgtccggcccatctgggtccggccctcggtgttgacccaggtcgcggccttttcagtgtaggccgagccggggaggcagacgtcggcaagctgggcgccgaggtcgccgtggtggccctggtagacgacaaaggcgtccttcgggattgacttggggtcaatctcgtcggcgttgagcaggtagatgaacttagactttgcgcgcgaggcctcggacgacggcgtgaagccaatgtcaaaggcggccgagcgcgaggcgctccgctggaggaccgaaaagccgttccactcgggcgtcaggaagcggtccttgttggcgtcgacaaacttggcgacagcctcgtagacggccgcgccgttggcctgctcggcgacgccgctaccgacaatgatgagcggcttcttggcgccggcgaaggcctttgcaaacgccgacttgccagcgtccttggcgccgaggaacttgacgacgtcggccgcgccctcaccgaggtgctcatactcgtacgtcaggtcgaccttgggtccgacgaggccaaactcgaccggcgtcttgaggtacgtccggcggaggcgggtgttgatgatggcaccctcgtgccgggggtcggtcccgacgaggaggaccgcgtcagcctcgtcgagcccggcgatcgtcgagttgaagaggtagttggcccggaagtcgacgccgtgaacgggcggcttggcgccggcggggctgtcaaccgtcaagttctcggatccgagccggttgaggaagtccttcagggcgaccatcgactctgcgtcggcgaggtcgccggcgacgccgacgagctcgttaccctgcgcgccagacttctcgagcccgtagtgaatcgcctcgagcgcgtcggcccagccggccggctcaaagcgcccgttgcgcttgacgagcggcgtcgtcaggcgctggaagcgcaggccgtcgtacgcgtaacgcgtcttgtcgttgatccactcctcgttgagcgagtcgttgacacgcggctggatccgcatcacctggacgccgcgcgagtcgatccggatgttggagccgacgccgtcgaggacgtcgaccgactcggtcttcttgagctcccacggccgcgactggaacgcgtacggcttcgaggtgagcgcgccaaccgggcacaggtcgacgacgttgccagacatctcagagtccatgactgccagaagtaaggagtggtcagcctcaaggaccttgcaaagggggctctcaaagggcgacgcacccttctcgacatacatgccgatctgcatgtcgttgccgcggccggtcgagccgaggtcctggacgccggccacctcagtcgcgaagcggatgcagcgcgtgcactgaatgcaactggaggacgtgcggggacataacgggcggcggtcaggacgtcttctctcttctggcaggtcatcgcggcaagagggacggaccggttcatgctcgtcttgacgagcggtccgaggtccttgttctcgaccgcgcgcttgccggtaatctcgtggaagcgcgaccgatccgagccgtagcgcatcgactggtcctggaggtcgcattcgccgccctggtcgcagatggggcagtcgagcgggtggttggcgagcaggaactccatgacgccctcgctgggcggggcgacgagccgagcaggagagggaaggaggtcagcaagtagagcgcagtcggttgacgacgaacggcccgacgcaccgagccttgtggacggtcggcgtgttggtgaagacctgctgcccggggagcgcaggcatcgcgcacgaggctaagcgtcgtcgaaggcggggaaagaggggtcagcttgcgaggtccggtcatcgggagaggcgtccggtcggcaggtaagtgacgactaggaagggactcaccttgcggctttggcgggccgggcttgacctggacgacaacaaggagcgagcgagcgcgcaggagggtgtgatcagcgggccgccttccccaaagcttgcgaggccgcagatctctgttggcgcacctcaacgaggcacatgctagagcgagcgcgagagagagaaggatcagcaatgtcgctcccgggcccggccggtgggggtggaaggcgaggcttaccggcagtttccagcgatcgcgagccggtctagagagcaaggtccaccaccaccaccaccaccaccaaagccagagtcagccagacggaacacccaaacacacccgccagtcgaccactagcatcccaaaatcggggggacggaccgtggtaacagaagcgaggaattgtcgtgcccgccgcctcggccgcctggagaatggtcgagcctgattgggtcgcgcgcgagcgggcgagtgagaaaggagagagaggggaagcgatggtcagcctcctttatgacgcttaggcgagagatccgtcgagcaccagctcgctcggcttgagactggcgacgcaccctgcggaacggtgacctggcgatgtgcggttgggcaaagagaagaagtgcgtcagcaagagaagacggtgcgcgcgccgcccactcgctctggccaagggcccaaagaccgagcatcgagcagcggcaaggactgacgctcgtgccatcgatcgtgagcgtgacgtcggccctgagcgggcgcgaggttgagaggagcctggcggcggcgggcgtgaggcgccggcggagggacgagcccgaggcgaccgactgtctgagcatggcagagggttggaagggcgggcgggcgaagggctgcgagagagcgggtgacgtcagcgggcgtggtcaaatgacttaatgatctggcctgctctcgctcggtcgactaacgagtgggtacttttggtggtgggagacgacgacgacgagaggaagatgcaccttctcgcctctccgattgggcggccagccgggccgacgctgcttgtgccatgcatcctaccaggtccaccaccctccgtcctgcatcgcccggcttcgaaagtcgtcccctctcgcgcgcaggcacaccctgctaccctacactgcactgcaccttcctcccttgccatgcccgccgccctgatcgacagcctcgagcggcacaatgcggcctttgagcgcttgctcgcactcatcccggccaagcactacatccggaccgagacggaccaggaccaggtgcgtcttggcgggcaggcgcttccccttccctcccctgctggtcctgactgccctcactttcttgtggctgccagtacggcaacaagtacatgaagaacaagaagagcaactcaatgcccaagcaggacatcaaggagcgttccaagaaggccaagaaggacaaggtgcgctgaccctgcgcgaccatttgctctgcctcgcttcgctgacacccttgggcacccacctgccttcgcctgacccggcagctcgacccgtcaaacaacttctcgctgcccgagatcctctctggccggacggccgccggaggcgccgattccgacgacgacgacgacaacgccgccatgtctgacgccgactctaccaccggcgacggccagccctcgacctcgtcgctcgccggcctccagccccttccgccctcgacctcgatcgcagccctgcacgccaagctccaagagcgcatcgcctcgctccaaggcaagcggttcgacaagccggtcgacgccggctaccctgcgcggggtggtgcgccggccgcgcccgagccggggagcaaggaggagctgttggcggaggcgcgcaagcggcgcggcgagctgcgggacaaccggcggaatgcgaggaaggaggagaggcggaaggaggcggcgggcaagtcgaagccggctgctgctgctgcgggagcggagaagaagaagaaggcggccgagggcgagctctcggtccggcctggcaaggtgcgcgcgctccggcgaggcttctcgaccgaccaatggtccagatttgcttaccccctccccgcctctccttccgttgcttgctcctccgacagacgacgctgctcgtgccggacctcaaggcccctcctcccggcgccaacgtctccttctcgcagtttaagctcccctcgaccttcggcgcttcgacgtcctcctcttcctcgtccaagcgcgcgacaaagccgctcccgtccaacccgacccaagcgctttcggtcctcgccgcgcaaaaggccaagctcgccgagctgccagacgacgtccgggtcgaacggcaggacgaggcgcgctggtcgaaggcgctcgagcgggccgagggcgggaaggtccgcgacgatgcgggccggctcaagaaggcggccaagcggaaggagaaagagaaggcgaagagttcgaccgagtggtgcgtccggcggatgctctctctctctcatgataggctgcagcaacccccctcgctgaccggacgaccccccttccctcttgcaatgctctcagggccgaccgcaaagaacacctgaaaaactctctctcgatcaagcaaaagaagcggtccgacaacattgcctcgcggctcgaggcgcgcaagaatgcgcgcaagggcgtcaagccaaagggcgacaaggctgcttcggggaagaagggcggcggaggcgggggcggcgggctgctggcgttggccgatggaagatcagtgaatgaaggtggcgcaccaggtcggctcgcagcgcgggccacgacgcctacaattctcgaccggcgcgaacatggcaagtactctccccagtcaagcgttcgctcagagggacggagggaagcaggaacattcccagagagagacgctttctgatctcacggtcagcgtgggcccagggcaagaggctggggagaattgccaaccggaggagggtgcgcgcgtaattgcctgttcccttgcctgagctgcttcagtcgcgctggctggaggtatgagtgcgctggcgggaggtatgagttgggagggcagaggtatgagccggcaggcagataggtatgagtcggcggcatgcggcagacggctgcgccctgctcccttgcctgagcagcctgaatcgcctcagcagcctgagcacgttgcggggcttccgagtcgacagggccgagctacagaccggctctaccctcgctcgttctcgcccccagtaagcggcgtctagtctgatcggccggcgatgaacgggcgggcgcactgctcgccagcgttctctcgccccggtccttcccttccattcagcgccggcgcccgtctgatcggccttcagtgcaggggcaagcgtcgcgcacgcgtcgcccgccagcaacgaggagtgatggcggcatgaaagagaggcaaggacgttacaacaagagtcgacggcttgacgcaaagaggatcgggcacgagtgagagggtgaaggcgagacggacgaagagaaggcggtcgtgatcgttagtcgggaggacagggtcggcgctagagtaaggcgcgagagagcatcgtccgggtctattactcctcacggaaggcgagccggacggtggcggcgaggatgtcctcgaccgaggcgcgcgggtcgacggcgagctggccgttgaccaggtggataatattgtcctggtcgaggctcatctgccgttcgagtcgagagagtcagccacgaggaagcgagatttgacagacggcgcataacaagtgatgcacctcgccgagccgtcgcaggacctcctgccgggtcaggacagtcgtcgctccatcggcgcgcggctgccgactggccgcgctaagctcgaggacggcctccttaaacccgtgattgttgtattggaggcaggccgtgatgagctcgggttcgggagcctcgggtcggacagcgagcatgccacgaaggaaggcctcgatcgaggtgttcatcgcatgcatctgggaggagtcgagcgagtcgtgacgaatgatagtcagcaccacagaacgtctgccggacagcagaggagagactcacctcgatcagccccctgatgacccgctcgagcagagtgccgccttcggcttgcgaaagccagacctcgactacagggccgccttcaagccaagggttggccatgacgacgtcctcggccggcggctgcgaggcaggctgcgtcggctgttgcgggaacgagccgggcgggcagcgcggcacgaaaggccgccggcggtgctgggcgcccttgccgtgctgctgacggtgatgggcaaggtcgcgcgcgtaatcgcgggcacccatccatggcgataggccttcgagacgtccaccagcgaacgtcggaacagtcggctgggccacgggaagcgcagggtaagcgccgggagcgacgccagactgttgaggggctaccatcgtcggcctggacgagaactcggccaggaaggaccgggggtgggaaagttgctgctgctgctgctgtgtgggaccaagcggcgcgcctggcggggccgggtagaggttcgcttgcacctgctcatacgacggaacgaccggggccgcgacattgaagtcgccaaagagcgtcgccgcaggcggagcaaaagcgcccggcatggcagggtttgtgccgggggtcgacgtggaggtcgaagtgccttcggccgtgtcagccggcttctctgcctcggttggcttctccttcgtgtcggcctcgggctccgagccctgcgcggcggcagctgcgcgccgctcgtcggccatccgctgaacctcagccagaccagcccggagctgcgcagtccagccggcggtcatggcttcgagctcgcgcagcttgccgtcgacgccatgcatgccgttcttgcggagttcgccgtgaacctggccaaggacacgctgaatttcgctctgggcggccgccgcctgcgtcgcggctgaagcggcgtgcgtctggaccgacgacgccaaggtcggcgtgtagacgcccgtcgccgcccgtgtcaggagggccgacatggccggcgagctggcaaacgaggtgaagagcgatgacaggtccgagaggagcgacggctcggcaacggccggcgccggctgggcccgcttcgggcgggcagtcggagtgtctgcagtgatgaactcatcaggcgggtcagaggcgaccgacgcggtcgttgattgagtgtcgagcgatggcgcctctgatgcgatgtcgggaacggcgtcggctggcgaggcagcgtccgcagcaaggtcggcctgcagagtcgccagaggaaagtcgacaggtcagtcgcggcgtatctcctgcgaacgcaacgatgatcaggacgtaccatggatgcctcgcgttgggtcgagattgcatgactaggatcgtcggccatctcagtggctcgggcctcgcttggtgtcgccgcagtcgccgccgccaccgctggctcatcggcctcgcgctcgaccatctgcatggcgtcctctccgaggccatgctcgccgccttcaccttcaccgaggacgacgacctggagtcgaacgacgtcggcccctttgccgtcttcgcagagctcgtcaaagaggccggcgagctcctcgctcgacgagagcacgcaccggtcgccgtcgcggtcgacgtacgaaaggccgagcgtctgcgccgtcaggctctctgacccccagagcgagaggatcttggacgtcagcgccgagtaggatggcggcgaggggaagcggagccggcgagcgagctgcaagtcgaggcaagatgggatgacaaggcggcagggcagagggctcgtcagtcggtggagcctccactcgacagcaggcaccgggtcgactgacctgctggttgggcgaagtgatcttaaactgggtgggctgtgtcatgtcggacgacatgctcgactagcggtgaacaagagaggtcgagatatggcgggggggtgaagggagagagagcaagcgagggcgccggtgggctcgaggcggccgagcgggcgtggaagggcgtgcgcgcagcagttgaccgctcgctcgcttgcactcccggggcagggccgtcttcctctccagcaaggtgtcacaggagagggctgacagagacgacaagagctgaatgaggcaagtcaaacgacctgaggctcggatttgacagcttgagtaggtggtggaggcttcggccgcactcgattgcgacgtcgcggaggaggccggcggcgtggttcagcgagaccagcagcgagactagcactcagcgatcatgtcatgtaacgctgtctgaagcataatccggatgaccggccgtcccgacgacggcgttcctgaccggcaagttgccgacccagagccgtttcctgtcgtcgtcgtcgtgcgccgtcgagccgctgatcgactcgggtgcccgctcgagcgagacgcgaacgtccgccccggccgcacgtagcagggcgtcgagcttcttgccggcgccgcgcgagtaaggcaagtagaaaacgacctcatgctcggtcgccggatgcgaggcgtcggcccaatcggcctccgacgctgtcggctggatgatacctccgccgctggcgaacatcgctggcgacagcggcgtcgggtcccaaacgacgatgcccgccgcgccgcgctgcctggcgttcagcagcttccgagcgaaggtgcagccgccacgcttgacgagaagcaggttgccagggagcatgccgagcgccgatgacggcaggggttcgcacgcggtgtgtcgatcggctggagggacaaccagggcgagggggggcgagccgatgtaaatcgccggccgagcgacgccttctcgagtcggagatacgacgccaccgaaggtcgcggcgccggcggtgatggtcatcaaaggtaagccgtcgacctcgaaccgcatgcggaccgaccggtctcgaacattcgtctcgttgcgcggcagcggagagtacgacgcggcggcggcgttgaagggccggacgatcaggggatccgtgatccagagcgtctggcctgtccgcaggttgtaggggccgacgtgcgacacgtcatagccggcgccgtcgagacgccgcgttaccttcgcccggacgttctccgtctgacgaagctcggcgccgccctcgaccatccgcagcttatccctcccgggtgacaggtccgcctcgacctcgctggcggaaaacatgacctccaccacccacttctcggcctcggcgatcgagcaccagccgtcgggccgccagagcgcttcgtcggcgtcatcgtcgaccaaatcgaggccgacgaggtggcgtgcgtaatcccagtcagctcgtctgcgagaagaggcgccggagtcagatttgaggtcatcgaagagatcgcgctctggcacctcacgcacctcttgacgccatgtatcagccctgctggtgggacgatgggaggacactggaggttttcgcccttgcgaagggcacggcgcgtcggcgacggcgggcgaaggagttttggcggaatgaagaggaggtggccctctgttgagaaaacggtcgccgacgaccagtcgtgtgaatcctccgggtcgtggtcaaagaggaggtaaaggtactgggttgtcggcaagggagggtcagcccggtagaccgcttcgaggacggtgaggtgcccaccttgagcgtctcgctcagagcaaagctctccatccggtccatctgcctgccagactcgtcgccgagtgtccagccggcaaggccacagccgcgaccgtcatcactgtcctctggaagcacgaggccgaacgtctcgaggtcttcaagaatctgctcgccgacctcgaggtagaagggatccctcgtcgcctggtagaggtagtaggtcgactctacaaactcgggccggaaggggtagtcgagattgtccgattcccgagcgacgacgtggaagctctcggggatgccgccgtaccgccgccaaaggttccagtctggtaagaattgcggaaggtcagaactgagtgtgaaagaagccggccgcaggacgcacaggcgaggtgggccttgatggccgattcagcgtcgcctgcgagcgtctgcagaccgggaaggaaggctgcgagcgagctgtgaggcgcccgtcagcgcgcacacgaagcaagccaatcagagaggcaggagaaacgcactcgacggtcaagccgatgcgctcgcccgtttcgagaccggcgccgcggtactgcaaaatgtgcccaggtcagaatcagcggagagttccactcagccgtctgaggctcccgagcatgcacccagaagccggtgtcgtcgcggacatgggtcatgacgccgccgtaaaagtcgcgaaagacgtcgtggaagcgctcctcgccggtgaggacataggcctgtcgatcggccagcgcagggttagtcttcggtgactcgaccatgcagcccgcttgcgacatgcgcaccttgaacgcatattcgatgaaggagtcgacgccggcgccgacgtgtgagatgagcggcggaatccaggcctaaggaggcagaggaggcacaaagggtgcagaggtcaggaaggaagacgcgtcgatgaaagagggctataacaggaccgcacaccgttgaacgcatttaaggcgttgccgatgaggctccgttcgctccgccggccccagacggcatagaaggccttggttgcgacgtcctcatactggctgacgccggtcagccggctgagcacgatccattcgagcaggaggctgcctgcgccagccgcacacgtctcggccgtttctccctttgcgacgccatgccggaggttgacccgggcgagcgggatcccggtcggcgtgcgaaaggctggcaggagccggtccgccaggtcggtcgctagctggagcagctctgagtcataccagtcaagagcgaaacccggatgggtcggatggcctggcagcgccaattggtgcgtcgctagcagaccgccgagcactcgaatggtctgagtgcggggtgcaagcgaaggggactcatctcagccagagtgggcggctgcgcctgaggcggcgctcggtcgatgggcgacgacgagccgccttctgcaggactgacaacttcaaagacctggaccttgacgtcctgatcgaaggatacctgttcgatgatgcgccggacggcggcctcaaagccatccttgtcgcccatgaccgcgagcgtgtcggcgacgtcgatcaacgtcactgcgcggacgacaaggcggcgcgaggccaacgactagtcagccttgacctcggcaagcaggagggacgcatcccgagagctcatacaccctcctccgacaggtgcagagcctctgttgttgaaagcgactcacgggagaagttgccgcagacgtcgttgacgctgccgggctgatccggtcccgggccgaggccgctacagctgagcggcttgagctcgtcctgcacgaggacgcgggcagacacgaagatgacaagatcactggtcagcttcctgcttgatcagagtgtcgacggcgcctggaaaggcagagggccgcaccgctgggtaggccgactccatgtacgcctcccagccgtgacgaaagaggtcgtacgttctctcgcgaaggtcgagcgtcagatccctcgtcaagccggtgccgttcgtgagcggaacatgcgacagtggaggagcccgcgaactgctggccttgccggctgatgacgacgaggcggttgtgggttcgaggccgacgacgggggagggaggagctcgccagcttgcgagcaggaagacggcgaggccgacggcgaggatcgccggcacgcggctcctgatcctgtccctatcgtgaccgccgctagagctgctgctagcaggtcggaccatgccgtggtcgtgagagaagggggcgaggttgcggctggcgatggcagtcgggaggaggcgtcgaagggagcgagcagggcgcacgtcggccgggtccgcgctcgcgcagcggcactcgtatcatcgtctctcacgccgctgatcgaacgtccggtacaggaagggcgcgactggcagtcggcggcccgtatcagtcagagaaggtgggacattccagagggtcgtgatcgagtacaacagagaaaaaggggagaaacaaggcacggcgaaaggaaccgatcattgcacgctgtgcggcggcgcaagtggcgtgtaaggggggtcaagagaggctggtcggatcgagacagcgcatgagcaattcaaggcgatgattcgtcgtgcttcggcgtgcagttgccgagcccgaagccgcaaaactgggcaatcaggacgtagacgaggaactgcagcgggatatgcaagctgaggtcagatgctgccgccgcgaagagatggccgagacggtcggaaaaggacaaacgatgccgacgaagccgctgagcgccataatctggagcgagatggaccgaggagttgacggcggtcagcctggtgctgctcggcaaaggaaggactgtaaccggcccgctgttgcagtgccagtcaagcgatggcaacaggaagcactgacccgctgattcttccaccacatcctcctccggacctgctttgccccgcgccggaaggcaaaggcctggccgcttaggttgtccgtcttgtcgacgaggagctcaatccgctcgcctcgcgagaggatctaagaggagcagaggtcagatgagaggccaggacggaaccctggctagagaaggaaccggaacgtacggcgtcgatgttgttgacctgtcgcaggcacaatgcaaaggaccatcgagagcggaggagcggcttatcgtcagcttgttctcaggtctactatttgcgttaggcacgaggccgcctgcctttacagacaccatcgcagccgaagtaccgatctcggacgcaccataatgtccttgacgttgccgaggtccgtctgggcttgcttgagcgcgtcgggcggcggcgccgcctcgtacgtctccatcagcgcgcggaggtccggctcgaaggcggacgccgcgtcgggatcgtcggcgagcgtgctgggcgggaagcggtcggtgaactgacggaggtgtaagagcggaaggattgggaggatgagcagcagtagcgggccggggatcatcaggccagggtgaaccagcgagtcgcaccttgcgcttcagatcggccaggaacgagaacggcatccggctgcagaatcagagggaaggcaattcagtcttccgcggcgcagacagagagtgcaaagccgactacagaggacgggacagaccggccgaccgagtcgtccgccatgacgaggtaggtgatgccgccttcgctgacatctgaggagatggcacgatgatgttggcagagcgggagacggcgaaaggccgcggttaagccagatgatgccgatgagcagggagggggcagggagagcaatgtcgcaatgcgtcagcttgaggtttagacggagaggtgtaggagaggaaggcgccacccggccgcaagagggccgagcagctcaaggcggctcaagaggcgacgcacagtgaattagatactggtcgacaacataagtctgcagtgtcaagaagaaagcaagagagtgagttgatggatcagcccagggcatctggatgaccagtctcgctacgaggcaggagccgtcgcagctccttccgacgcctccgacgcctcttgccgggtgacacccagcgctcgaaagaacgacgagcaacgggagacgtacaagcttcgagtcgttcggcgggatccggctgagaaccgagctgattgcctgcgaaaagtcgcgcgagccgagctggcagccgacgaggatggcatcaccttgggagacggtcgcctggaggagcgacatgcggggctgggcggtttcaaagaaggctgctgctgcaactcaaagtcagcaaacgtctgaaaatgagacctggatagcgagcgtagagccgcaccttttgcttggctgaaggtgctccgaagagagtcgagtcggagtcgaggttgggagcaagggcgatggacgaggcaacgcggcgcacgggctgctgcgtgcggccgagctgcttgccgggcagtgcgaccgagcacaaaacctccctgcgtcattagcgctcaagaggtcagctctcgcttggacgagcgcgtactcagctgctgataacgactcccagctctctcttcaggcggacgactggccggcaaaggacgacgcaagggagggcggtgcgctgcgcggcggcggcggcgctgaagctgcctcgacgagctcacccccctgtctggcgcacctctttgcccccactttacagtctgaacgtcaggcgagatggaaagagacagacaggcatagtcgcctcgatgagagcctgtcgtgctgctcgtcatctggaggaggccagcagagcggcagcctcgactctagacggcacttgcactttggccagcagcgcgcggtctcggcgcgagatggccagcgcaacgaccgtctcaccacgacagcctcctcctcctgccttctccttccaccacctccttccgtcgctcgcatggtcggtcccagctgcgtactctgtttgcgactctcaggtcgcgctcgctgacacaacgcgtctgcccggccagtcttcctccgctgcctcgacctctgtcgccggtcgcccgacgtcgcccccggctgcctctgaccggccaaacggcgcttcggctgtccggtgtgtccccttacgatgagagagaagcgtcctgcagggacgtcagcggctgaatatcttcgctcgctcgctttcccgttcgacctgcagccggcgtgcccaggcggccaagccgctcagcacgcgcgctgccggcgctggcggaagctcgcagacaatgctccggctctacacgtcggacggcgagggcggcctcaaggtgtacgtctgccactttccctactcagcatacgcccccatctagccctttgccctcctcagcttcagcttccgccgagccatgcgtggcttcgggccgcacctcgcccgccgccagaccttttagctgacgacccgcccttcctccctgtccttgcgacgttcaccagcgacccgttcgttgtcgtcgtcctctcgctcgccttcatcgcctccatcttcttcctccacatctcgtccaaggtcatccggtccttctcaaagtaaggtcaccactctcacggccgcggcggcccggtgcgtcctgcggcggattacatcctggcttcgaccgcaagtcgctttgccctgccggatctagccgtcgcacgccaaaaggacgagctgcagcgcctacgacgagagtcggatccggtcgatcgtcgcgcgtcgacggcggacgagcagtctcgtcgttgccgcgctcgccccggcgcctctcattccattcccactatcccagtccccttcttctctgcgacggctctctctcagaagagcgttgtcaccacaatatacccccctttcgtcctgcccaggaaatcgcgctgcttcagaacagcttgcttcccgctccaatgtccagggctcgcttgcaggcgaggcaggcaagatgaaggctctgttgcgcagggacaggaggggatggtctgcctgagggtgcttgagtcgcgctaagaaacgcgaggttagctggggctgcggacgagaccttcagcgctcccggcagccgacctgtgacgaggtgagaagggcgagcgaatgtcgcgtctcacttgtaactgggcgagcatagcgctgctcggacgagagtgtcgagtcgaaacggatggcacgaggtcaggcacgaggtgcaatagagtcggccggcccgggcaaggtggcggagccggtagccgaaagcggcttgccagtctcacctcgtatgctcgtccaaccctcatctccccatccttctctctctcacccaagccctccatgtcaggtcctccgctcggtgataaaatcgaaccctacgtctactccgttccctcgacacggctcctctacaagccgctcgacaacgtccaaggcggaggatgctgggccgacgtgtttgtgcctgaggccgaacagccggcggagggctggccggtcggtcggtccctctctctcgtcaatctgctctgaggaggctcgaacaggatgagctgacgaaccactctcgctatgctgccagtcatcatcatccacggcggaggtgcgttcttgcggagctgcctcgaggctcagccctcctgctgcgcctgcgcctgcggcccgaacccgcccctctgaccatctccagaggctgatctgctgctcgctccttttctgtggcatccgtctatggcttcatcgtatccagcctttactgtcggctcgacctgcgagcagccatccgagcagattgaccgtctcctcgcgcacggcctcgcctgcgtcgacatcgagtatcggcttgtgcgtcccttacgccggacacacctttgaacaaccgagtgctgacccctcccgtgaccggctctggtaatccgaaatcgctttacgcaggcccctcagtgcgtcgagccttatgactgttgtcgcgcctgcctctcggctgacctcatcctttggtctcagcgctgacatcacccagatgaacgacgactgccttgacgcacaccgctggatctattcgggcgcgctcaacaaggcactcgcctctgccacgaaagagaagggggaagaacggttggacaagccgccgaagatcaacgtcgaccgaatctcggccgcgggctactcgtgcgcagccttgtgagacggaacgcctggctcgatggtggacgctgatcattccatactctcaccattctgcagggccggcggatacctcgcggcgatgcttgtctgtacctgagccagccaaaagctcctccgacctgcctgatactgatctgctgcggttcattcgaccttgctgcagggccacaccgcctcgcccccgctcaagtctgttctcctcttctacggcctcttccagctcgtgatctgcggcacaacgccccggtcggccatctacctcggcctctcggacaaggaacaggccttccttcgtaagatggtcgacgggcctgccctcacgagcgccgaccacgagcgggaacggcctgggccgaggaggatgtggatgacggccgtgcgttctcctttctagccgttgaaagctttcatcaagtactgacctgtcgcactcccgttgcaggcactcgtcgccgacgccctgcttgacagccttctgccggtcgagatgatcaacacggacgaaaaccggcgctcgctctcgcccctcttcctcgctacctccgcctacccgccgacgttcctcatcgccccgcagctcgacacgctcatcgcaccgacccaggcctatctgatggcagacaggctgaaggagctcggcgtcgaggccatcgtccggcgcgccaactatgcgccccacgcgtatgaccgcaaggtacgcccagagcatgcgatgctttgccggctcacgactgacgctcagctcttgcttccctctacctcccgtgctcgccgactctctctcctccgcgccccctccagggaggcaaggagaacgcaaccggcggtcagtggtgggacgagtgcaccctcccgggccttgacttcctcatcgcgcggacgtagggagcgcggcctcggctagaccgtccgacgggggtactagatgtataccatgcgaacgcggttctttttcatgtctatgttcctcgccgtcgtcgaaaggcagcagggtcgtagaatgaccgaggctcggcctctcctgagccggccgtctccgtccgaggttgcgccgtgctcgctgcccccctccctcctccctccctctcgactatcttcttactcgacaacatgtctgaccccttcagggagacttattcgttcggtcagccgatccggcgcttcctctacaagccgatcgacgctgtcaagggcggcggctgccatgccgagatccatctcccgccgacgagtgtcgcccggccgccgaccggcttccctgtcggtgcgtcgcccgtcaggactcgctgccagcgagagtaaaggagacttgttgactggctccttccgacctgattccgacccgtcagtcatcgttatccatggaggagcgtgggtcacaagcggcctccgtcagctcccggctcagcaggttgactacctgctcgctcgctcgctcgccgtcgttgacatcgagtaccgtctggtaagtccctgcctttcataggaactggatcgaaacccggctctttctcccagcctcgctgaccgtctctctcgcccttgacccttggccgtcagttaccgcagtacgtcgctctcgggcaccgtggacggtcaacctgcagctcgacttatgcctccctcctccctgccgtagcgccaacttgaacgacatgaatcaggacgtgctggccgcgtacggttggattcggactgatctgaacggcctcctcgccgaggacacgggcgagaccgtcattgacggcagctcggtcggggccaccggcgacagcgcaggcgggtacctgtccttaatgctcggcgttacagcccagcctccattgagggcagtcgcaccgttctacggcatgagcgacctctcaacgctcgcgagcgggagcaaggtacgtcaggcaggttgaccatcaccgcatcctgcgggcctcggctgacaagctgctgctggcaacgctaaggatgatatccgtctcggcttcaccaaggcagagctctcttacatcgaccaagcctacactgatggctccctgacatcagctcatcccgagtaagatctgcgtagcttctatctcgttgcaaggcctgctagtgacggaagtatcacccctgctcgcagatggtctcacccaggcccccgcctcgaatggcgtaaggcggcgatggcgtccgagtcgctcatcagccatctcgtcccggaagactcgatagagaatcggaagcgactctcggcgctttacctggcggcggtgacgtaccccccagtgagcggaccctcgctctcaggctgccagcgtcgactctaactcgagccccccatcccaatagaccttcctcgcgatcccccagttcgacgaggcggtcgctccgacccagtcatggcgctttgcagagaagcttcggtcgcttggcgtcgaggtcgagactggccgtgccgacggcggtgggcactgctttgaccgacaggtgcgtctctcacttcttcgctttttgaggcctaacggtcaagtggccttcggctgacctactgcaagcacgtagggcggcgtgctcaatcaagagggcggccagtggtgggaggacgtcacccggccggctctagactttctcgtccggcacctgacggtcgagaggtagcggggttcggacgcagcgaaagctgatgggcaccacgccgcaagggccagcagatagatgtctttcttatggcatgacagtcatcagcgatagagaagcgggccctctcgacttatggcggacgaagtgctctcgatggcagaagcgatgcgtacgcacgtcgccgggcaaagggcgatcatcaagagccgccgacgcgggcgtctccgagcttgctctccttcttgacgactctcctgccgccagtcttctcccagtgatagtcgcgccctgtacgagcagcaacagctctaggtccagactgacccagcggacgctcgatcacaagccgtcacctccagctccttcggtagtcagcgagctcaagccgtacacgcgcacgaccatctctcgacgtcagctcgctcgccggcagatcgtaattgaaaggtcggtaccgcgaaggcggcggctctttcgggacagggaggccttaccagaatgagtcgcaagctgatcagctctcggcgttcgacccttcgcttgcacgaccatcagctcgccccctgcagctcggcgccctccccccttttgcccctccgatggactctctctcacggctcggccagcggatcagcgagaacatcaatgtacgttgctgctggtgggtgtagacgactgcgtgcaacgactgaccggggctacctgcgactcatcctgcaggagtcgacccgcaacctgacgttcgccggctcggcgcgcgacctcttcgagacgaccgaggaccaacgcaagcacatactcaagctgctcgagagcagtcatgaccgcgagaagatcgagggcatgaagcgcctgattgcggtgcgtcaccgcggctgtgcttcagatagagcgagctgctgagctgacgagcttctcaccgcccgggcaccgcagctcatctccaaggcccacccggttgcgtctttctttcctcacgtcatcaagctcgtctcgacgccgacgctcgagctccgcaagctcatctacatctacatcctccgccatgccgagtcggagccagacctcgccctgctctgtatcaacacgttccagaaggacctgaacgacccgaaccctttgatccgaagcatggcgatccgcgtcctgagcggcatccgcgttccgatggtcggcggtgtcgtcgagctcgccgtcaagaaaggcgcgagtgaccccaacccgcacgtccgcaaggccgcggcgcttgcgatcccaaagctctacggcaccgacagcgcgcactacgcgacgctcctgccgatcctgactggcttgctggcggatccgtcgtcgatcccgctcggcgcagccatcacggccttcctcgagctctgcccgcaccggctcgatgtgcttcattcgcacttccgccgctactgcggcctcctcatcgaggccgatgagtggacgcagctggtgctgatggacgtccttggccgctatgcgcggacgatgctcaaacgcccatcaagcggcgacgaagacgacgacgacgagccagatgaggatctcgtgcgcttgctgtcggcgaccggcgccctcctctactcgccctcgccggcagttgtcctcgcggtcactcgtttgcatcacctcctgtcgccccctccaccgacgccgctcccgcatcttgctccttcactgctcaagctgctccaccatccagactctggcatacgcctcgcagtcgtacgctcgtgcgcccagctcgcccgagaacgacccgacgtttttgacgacgagaccgacggcgaaggccgctggaaggcctttctcctcagcggcggcgagggcgggaccgaggcccgggccaagctcgaggtcctgcaggagctcgtctccgagtcaaacgtccgacaggtggtcgaggagctcatcgtgagttctccccgctactgctcgctgccctccctcgtgcttgaggcctagcttaagctgacctcattggccggcggccagttctacgagcgaaacccgctcgagcagacgtcgacggctgccatctctgctctcggctcctgtgcgcgacgacgagccgaggtccgtgaccaggtgacgaccgccctgctcaaactgctcaagaatggtcgcggtacgtgccatttgtcggtggtcctggctcccggcctgcgctgattgctgacgctcctgtcattcttgatcgcagactcgaccatcacctcctcgatcctcgtcctacaggagctcatcctgtcgcaaccggcggaccatgccagcgtccagtcgacggtagggctcgttacccgtcttgctagcaagctcgagggcatcaaaagccctccggcgcgggcatgcgtcctcggtctcgttggtcgcttcccgggcgagggcggcctcgtcgggctggagattctccggatcggtgctcggggcttcgcgcaggaggtaagtctccccaggctcatcctgcccagcgtctcgagtctgacgaggccgacctttgcatctgcccactttgcagcaaccggaagtcaagctggcgctcctgacactcgcgaccaagctctttgctctgccgaacatccaggctccggaccagcttcggctgctcggccgctacctctttctccttgcacgctacgacggctcgtacgacgtccgtgatcgcgcgcgcttcctgcgcggtctcgtccgcggcttgctcgacgagggctcagccgatgacgaggatgctgaagatgggacaagagatgtcggcggtgtcgtgcttcggcaggagcagatcagcctcgtcgtcggcggcagtaagcagccgatcgctgctgctagcgtcaagcaacgtacgtctgacgctgcgtcacagcaagcccaatggtctcggactgacgctccctgctctggtgttacagtgcctcacgccgagtttggcaccgcctcggccctgacgcaacctcacttcctcccgggctacatgccgtttttcgactggaaggaggagggcaccgacccatcccttcgagacccacccccgtcgctcgggacgccggcgtacacacccttggcgccgaccggaccttcgagtctcaagggattcgggagcgattcgttcggcgcgtcgtctaacagcggcttcagcagccgcggaagtggcggccgaccgacgacggcggcgacaagcgcgcccagcagcggccggcgaggcgaggtcgatctcaacaagttctacgagagctcgaggtgcgttccgaggacctgccgctcgattatttgcctgcagatccgtgacgactgactcgcttgctgtcgggacccaaaagtgagggggaggatgacgacgacgacagcgaggacgaggtcgagtcttctaaggacgacagctcagaggagagcagcgaggaggaggacgagtcggacgaggacgagggcagcgacgaggccgacgagctggttcgcaggccgaaggccgcctcgacgccgggcgatgacggccgcaacggcggtccacccggccagcagggagtggcgagcagcggcgattcgccttggcggtgacgcgccagggatccagaggggatgatgcatggctcagctagaggtcgattaccgtctggcagcggagaggcggcagcggagaggcggccatctcgggcagcctcggaagggcgcgcgcgaaaggggcggcctgcggagacggagcggccgacgcccgagcaatttcggcaggcgcgggcggcggcgtcgcggcctggcccgaccggcagagtagatagagctcgcctgtactccgtcctcgaccttcgaccctgcacaagctcagcgcccactctctactcgctacgcacctccgctcgctcgtcttggccaagcacccaacctctcgactggcaacgaccgcccagcgccaccgccttcgggcccttcctccctcctccctgacatccgccgcctcgcagccacgatgctcatccttcccaaggtcccgcaccacctccggacgctcacgtcttcggtctcgcgcctgatcaatccggccgcgtcgacgtccggctcggccgctgcagggccgagcgtcacctttacctcatccggcggcggcgcctttggcaacccgatcatcggcggcggtggccccttcacgagcaacagcttcctcgtcggcggcggtgccctcacaaagacgggcgagcacgccagcggccagctcggcttcggcgcttgggccccttactctggcggagcaggaggtggcgcaggcgcaggccgctcaaaggccggcacaggacactatggctacacggtcggtcccctgcacctcaacagtcgctgctctgctggcgctcaacgctgaccccctttcgctcttccagggccacgcccgtgctttcatctcgtcagcaccgacggcggccgacatctccaacaacctgctcgaggaggacgaacaggacatccaggccgccctggccctccaccgctcgcggctgcgctcgtcaagcgggtcgggccctgcgcccgcacacatccgcctccagcccgactcgctcaatatcatccggccccagaggacgctccagctcgaggatggccggggcggcgaggagcgtgctcggctccgcgagctgatgcgcgagcgctcccgtcacccgctcgtgccggccgcttcgctcgccgacggcctcgcccgcgagccagcctcagacggcctgatcgaggaagatcggtccattgcattcgactcgcgacctacgcggcggcccaggggtcgttcgatgacgtcgcacccgctgccgttcggccgatcggctgcatcggcgctgctggcgtcgacgccgcctggtgtcgccaccggcttctcccatgcgcgtgccctctcgacgacggctcccgccgcgtcctcgctccaggccgagtccgccacgaactgtgaggaggagctcattgtcttctccgaagactttgacacgtccgtcaacacactcgcgcctgcctcgaccggcccggcgacctactcgcccggatccgtcaacccacgtcggtctcagccgctcgaggctcggtccgctgcagccgacctgccgcctgtgtcgtcgctcccacccccgccgcagtcgtcttccgacgacggcagcactcttgagtcaaatcttgcggacgcttccgcgccgactctcccgcttggtcttggcttcactgaatccccgccgggcctgtcgctgcccagccggatgggcgccaacgaagacggctcgatggacctcgtcgaaccggagcctaagctgccgcagagcgtgcccgagggctacgtcgacccggctgagctcgaccacctcgacagcctgcgcgaggcgcactactcggcctcgaccccggagatcatcgcgacggcgcgggcgtacaatgagctgcccggcatccggcctgcacctggtcacgacctgctgccgatccagtcgaccgagtcgttcaccgccacgctcaagacgctcgccgccaaccggccgccaggcgcgcccgtcgaggagatcaccgccgtctggtcggcaatgctccgccagggcgtcgcgccctcgatcgagagctacgccgtcatgatccgcgtcctctgcgagcgtcagctcgaggttgccgagacgaccgcgtttgccgaggccgacaaggccttcgtccgcaaaaagtctgagactgacgaggccgagcggaccaacctgatgccggagccggtcacgtaccgcttcgccagcgaactctcggttgcgagcgtctgccaagagcaggtctttaagcaggcgttcgccctcttccagacggcgacgacgttcccgaccctttcggccagccctctcccgatcgagacgttcgacgccctgctcgccgccagtgcatgttcgcccaagccgtctaagacggcccttaccatcttttcacatttgcgacgggcggtcgaacgcggcacaggcctcgcgtacacctacgagtcgttcgctggcctcatcgccgcctatgctaaagcgggcaagatgcaggacgccgagactgtgctcgagggcctccagtcggccgagcaggagggcctcgtcgtccttccggccggtactcggtgcgtagttcttgcccaacttgacctcggccgtcctctcgctgactgaccacttggtcgtcttgcctccgttcagtgacgccgacgcgcttcgcatcgcgccttggaacgccatgatttctggcttcttccagaactcggatacggccgcggccatcgccgtcgttgagaacctcatcgcttccgtcttcgaagccgacgctatcccgccgcctcccgttcagccgtctacgtttactgccgtcatccagggcttcctcgccaacgacgacctcggctctgccctgtcgtggtttgaccgtgtcgccgttgccgacaacgcgctcccgccgctcgagccgctcgcctacatcgcgctgctcgcccgcgcctccgggaccaaggacctcaagacatttgaccacgtctttgaccggtatgttccgacaattgacccgtccgccgaatgttggcaccgctctgacttgctctgctctgctttactttgcctacagcctgactgcccatgtgcctgccggctaccacctccggccgctcgaggttgctgaggctgtcaagcttcacctcgctgctgccggccaggccaaggcgacggccgaggaggtcaactcgcatatcgaccgcatctttgagtttgtcggccgctgcgaccggcacgagcactcgcgctacctctactccgcgatcctcgccgatccgctcctgcgattgctcgtcgagcatgcccggatcgaggagcttcaggacgtctatgcgcggacgatccaggccggccaggaagatgtctccgactcgcttgccgctgtcaagttccacgccttcttcttcgagtcgatcgttcactggttgacgacgccgcacgccaagcccctgccgttctcggtgactgagcgcctcgagctgctcggcctgctctcgtttgtggcacgccaggccggcattccgaccgacctcactggcgagcaggtcatcgaccgcgtcctgcacctttacgagcaggcccacgtcgaggccgccggcgcaccgttcctgtccgaagcctctggcttgctcattgccgacgtcgaggctctcacgcgccagcgatttgagttcgcccacccgcacttgtccacgcctgctgccgagccaatcaccccagacaccgccgctccccgcgcccatgccgcatcggctgccgggaccgcaaccgaggttgcatcgcaggccagccttgactacggcttgtcccgaactgcgaccgagacgccgccgagcagtctcggcgaggacctcccggccgcgccggacctgattgacgatgtgtttgcggcgcctgccgaacccgaggcggagcccgtccgctacatcatcgaccccagcctcggcgctctggtcgacgcataccggacgcacaaggccggctccaatggcccgaccatcctcgacagctacagggtcctccagaacgggcttgagcgcggtacggccccggtggtgaacaagctctacccgatgattggcgcgctgggccgcgcgcgcgaacccgaaaaggcggccgaggtgctcgacctcgcccaccgcctcctgctccaggacgccccccacgacggcgtccggctctggtaccagattgagaaccaggccatcattgcctttgcgcattgcggcatcatggaccgggccaacttccaccggatgaacatcatcaactcaaaggcagccccgagccccgacgcctactctgccctcgtcaacgccgccaaggacacgaccgacgacgctgccgtcgcccggctcctcttccaggaggccctctcgctcggtgtcgagcccaacctcttcctctacaacaccgtcatctcggccctctcgaaggcgcgcaagtcggacgaggcgatcggcctcttccatgacatggtcaagaagggcctcgagccctcgaccgtgacgtacgggacgatcgtcgtgcgtcgcccctcgcttgctttctcgtttggctcagcgacctaacgtccgactcctcttgcctcttcagaacgccttctgccggacgggagacccggccaacgccatcaagtttttcgacatcatgtgcaagcaaccaaagttcaaggcgcgcgtcccgccgttcaagtacgtccgcctcctgctgttgattgccagctcgccggcttactgaccgaacgctctccaccctcccccccccctttcccttcttcagcacgatgatgcagtacttcacgctcacgcagcccgaccgggcccgtgtcctgtactactacgatcggctcgtcgaggccaaggttcagccatcgtcgcacacgtacaacatcctgatgcaggccttcggcaccatcgagccggtcgacctccgggcgatgcacaaggtctttgacacgctccgcaagaaccctcacgccgacgcccgggtcgagggcctccactgggcgacgctcatcaactgtcacggcgccgtcaacaagggtccgtctgctctgtcaacagtcgaagttagtctggcgcatgctgacctcccttctctcacctcacagatcttgacacggcgctccaggtgtttgacacgattgccgagcacaacgctcccgaattgccgttggctcaaaaggccctgccggacgccgtctgctgggaggccatcttcaacgtcatcctcatccaccgccggttcgacctccttgcgacgtacgtcgagcgcctggcggcctcgggcctccagtcgacgacctacatccaaaacgtcctgatccgcgcgctcgcgaccgagggcaacattgagaaggcccgggagctgtttgagtcaatgacagacccgcccatgggtacgtttcttcttcgttgctccgctgccggcagccgtcgacagtgattgactctctctttcccatgtcgcaggcattgccgcccctcacgcgcatctcaaccgcaagaaccgggtcaaggcggccgcgcctccgccgccgggcgtcgtctaccgcgagccgtcgtcatacgaggtccttgtgcgcgccgagctggctgcgggcgagcgcgagcgcgcgctccggctgtgcgagcggatggaggagcggctctaccctccggtcatcgtcgccaaggtccgtgggatcctcggagaggacctctgaggagcgagaagcttttctcccacaccgagccccccccccccctttgcatgcgttcgtctcactctggaattggcaacgccgactccgaccatcaccactccgtccctctttgcatcttgccctctgctctgttgttgccatcgccacctcgtcgccgccagatcgccgccccgctcgttcggctagcgtcgcgtaccgcctccatgtatccctcccccccccccccctccttcaaccctccagtcggccgtcgacgacgtcatcgactttatggacgggtacttcctcaacaaggaggactgggacgcgatggtcgagctcggcgtcggctcgcgctgcgaagaagacgtcctcaagctcatctcgacggcgaccaaatcgtccttcacgcgcaagtgcgtctcccgaacgattcgcgccactcccttcccgcatccatgcaagccgctgaccctgcccgtcccctttgcttgctcgccgcagctacaacaagaaggaccacccgatcgccgtccacaaggcggtcgccatcaacttcaagaaggtgacggccggacctaaggccgaccaggaggacgtccaggtgcgtcgccttctgaaactttgcccccagagctcagactgctgacgtccagcgcctgcaggaggaggacatcgtggtcgagtctgagtcggaggacgacggcaaggacccgaacgacctgtctaaggacaagctcatcaagaacaaggcggccaaggccaagccaaaggcgaagggcaaggcggctgccgctgtcaagcccgtcaagggcgccaagaaggtcaaggttgaggctacttgaaatacgggcgagcgaagaagtgcgggagggagaggggaggattcgacgattcgacgagggtcgacggcagcgtgcacatgcgagccgccggcgccattgtcttaacgccctgttgtaaatcatgcagcccttgacgaccactgattcaccgtcatctcatgctgcctggccgagaacagtgaacaggcttgcgttggttgggagggcgagccagtgcacgggcgtcgcatcatgtcgaccgagacgcgactccgcccgccctcgccgtgctcccctcaccctcccgaccatcaccccagcgccctgcctcgtctcgacgcacactcaacctcttcatcgtcggtccgcgctcgcaacatggcagccgaacgctggcagccggctgactctccgcctggcctcgaccacaacctgcagcagaccgctccggccctcatcggacgctcgccatgacctccaccgccccgcccgtcacccacatccagacgatctacaccatccagccgcacgaaatttcctgctggctcgccgtcgtccggcagtacctcgacgctgcggccacgcttgtcgctttcaacgggtgaggatgcccggcttcgtcggcactgctgctgcgcgccttcgctccttcgctcgctgaccctcagccggcttggactcgtacagctaccagctctaccggtcgtttcacaagtcgcacgtcttcatgctcgagatgacctttcttgtcaacaagtcggtcgtcaaaggtgcgactccgctggacgctggcttcgcgggccgccgaccaattgttagcgcgcttgcctgacccctcccttctctcgctcgacactctctcacagcggcactcgagactcccagctacgaagtttgtcagtcgacctccgacacgattgttgcaaagtgcgctggcatgactcgtggtcaagagtgttgacccaccggccgggcttcttctctgactcactgcgcagacgagctcgcctgtcagggactcgtcgccgagaagaccgtttcgatctggaccgagggcgcgctgctgcccggcaatggcgagcacaagggctgggtgctgatcgaggagaagtgacaatctaggtgctgcgaaggacgatgcgcgtcttgcaggcagcgctcccacgcgagtcccggccagtgtgatctcaagtctttggtctctgaagcatgcctgcaggtagcgctactcgtgctgacctgcaagggctctttttaaaggatgcacgagtgaaggaagtgcggtcgtcagacgtacggtcgaccttcgaagtggagccccgaacgtcctggatcctggcccgtgctcgcgcaaccgcgacggcctgcttggccgacaagtcagcggacagtcatcgacggtcgtcttccttccaagtcaccactgacccttccttgggccggctcgcggttctcagtctaggcttgctctgctcgtcgtctctagcaagatcgaccatggaagctgtcgcgggcggcttcgctccggcctcgagcagctcgctttggcagccgccccggccgctagcgacctcgagctcgaccacgcccgagcagcagcagcagtcgtctactgcggctggaccgagccggactctcaagacgaggacgaggacggggtgcatgacttgtcggaagcgtgggtcccttcatcctggcggacatctgacgggccgatcagctcatgagtctcagctcgctgaccaagagctcctctgcctctggcattccgctccctctcggccgtcgcttgcaggcaagcacaagtgtggcgaggagcacccgagctgcgaacgctgtctgagggccggctttgactgcgtctggccgacggccgaccagatgccaaaaggtcgcgcgcctcgctcccgccggaaggttccggccacgaacgctggcaagacgccgtcggcgacgccagccgggctgcacagcgcatcgcagcagcagcagcagcagcagtccgcttcgtcattcgatgatctcgatgactacggtcagtgggatctgctggccgacgccgacgcttcggtccaatcggtcgggtcgtccgctgctgcgcctgcatggacgccgggcgtcttcgtcctagacgggacctcacctcagtcggcctcgccggcgagcacttcaacaatcgcagcgcagattagtccaggctacatgtcgcggaactcattcgtcccgtggcagtcgacagcctatgggaacggctgggacgcagctgggccaggcgatcaactgcatcaagcggccgccgtcgactcggatgcagcgtggatcgaccaattgctgtcgtccatatcgctccccgaagccatgcagggctttccaaccttcgacgatcctctgcacgccttcttcggagccaacggccatgctctggcggaccatcgaggcctacgcccgtcctcgccgcaagcgggcggtcatcctgcctgggcaacgccgaccatccgcatgcccctttgctcgacgccgacgcctatgctcgagctcctcttcaaggacccgaccgagcggtcactcgtgcgtctgtccctcagccgacgctggggagcgcttgcgcatgctgacgcccagcctcgccccaggtccagcactttctcttccagatctcgtgcgtttcgcctcctctcactgtcgattcctcccgacttgctgacccaccgatgcgtcccagggcgatcttcgttggacgggcgccctcggcccgtgggacgcgcgcgatccccgccgagctcctcgcccgcggcgagcagctcgacatgcggctcctcatgccctattttgactttggcgacttcctcgctcggccccgaggctcgagcctcgcggtggacgcgctggcgacagcgatcatgagcctctcggcgagccatctcgcgcacctccatcacctgtcgaacgtccatggccgagagatcggcgccgacgcaaaggtgaccgaggcctcggcgctccgtgcagagcagtactgcaacgcaagcggaagcatggcgaggacgtctttatctctcgttcgctcggcgctcaacctcgccaagcttgacgctggtagcagcggtggcaacactgatgacggcgccaaggtcgacgagatgacgcgccttctctcggcctgctcgtttgcacccctgatcgattgcgtctcgaacggcaacgactacaagcaatcgctgacgctcgcaaaggatatcgtcacgcactctggcggcgcgcgccggatgctcgagacggtcgctgcggccatccctgcgagcccggctgcgccgcaggcggcagcatgtcggcggcgactgcgactgttgcgctcggcgctcgaggaaatcgcctcgtgggagatggtcacctcgctcacgaccggccaagcaccgacgcacttcgtctcgacgccagcgatcgggagtgacaacggcagtaatgacccacaacaccagggcgagcttctccaagactggctccactcgttcgccccgcctagcggctcgtgcgactcggacagcagcgactgggagacgctcgaggcctcgtggggcgcgagccggctgcttatggatctctttgcaagagtgagatgcgctctctccctcccttcgcgagcatgttgggcgcctgctgactctgcgacttgcaggtcaacacgctctgcgccgccgctctcgcgagaccgacctcgctgggcgcttcgcaagcgacgatgaaggccgcgtcgacgcttctcgtcgagatcaacatccgcaagactgacgtcctgcacagataccccgagctcagccagacgtccttccctccactcccgccgccgctgtcgactgcagcgaacgaggcggaggccaacgaggaggtccggctattcgtccagcgcgtccggttcggcaagctcggagcgccaaagagcggctcggcggcagggttcgttaaccagcgccgggcgcggagaattgacctcggcgacctgctttggtgtctgatgctcgaagtgagtgttttcggccttcgagcgcgtttgggcttgcttgtagctgacggagacgtctcgcgccgtgttggcagctcgtgctccgcatcgacgtcctaggcgagagttcgacggcggccgacctccaaacgcttgccggccggatcctcgacctcgtcatcgagtcgcatgcgcggcgcttcgtcccgatcgggtgcgtccggcggctcttctcacgcttctcattctcgccaagactgacaggccggcgcgtgtctccagcttggcctggccgatgatcatcgccgggtcgatcatgccccacccagccggccgcgagcaggcgcgccgcgcgcttgcgacgttcgagccgttcatgctgtttgagctcgagcgcgtggcggagctttgggacgaggtgcgtggactgagcggcccttctccatcttctgcactcggggctggcgctgactgtgggctccgacgcatggtggctcttgaacaggtctgggcggatagagacgaaggcggtcaggcgacttggcgggacgtcgctgctcgcaacgggggtttcgcgctcgagtgagtgcacgagcgctgcagtgacaacctggcatggctctcgagaatgtgctttctgagacgcgacgaagacgcgacagcggctggccgagaggattgaagggagaggaggtctcatgtcaatcgacgcgtgctaacgccgctctcagtccgaaaagtcaccaatctcgtcgccctcgatctcgccctcgccggccatgtcgtcgttgtcgtcgccccctctgccgccgaccgcaagcccgtcgtcctcttcgcgcgcagtgaacataacggcttgggctctctgaggccgctcggcgctgacctcaaggagctcgagcaagccgccgccgccaccgatggctgccgctgtcgactcgagctcgtcggccgagtcgccggcggcgtcgtctgtgccaagcaggatgctctgcatgttgatcgctgagcgggacgagaggtcggtcgtgtagtcgaggtacgtcaagtctggtaacgcagctgacaagcggcgagcgtcagtcgggaggcccaactcggatgggatcgcttgagcctaggcaacggaccagggtacgtcggcgggatctcgagatgccgcagctcggggatgagcagcgtcgtcagggctttgcgtgtgatctggcctggtaggcgaggccttggtcagtggagcagcgcagacgtcgatgcagaccttccctagacgtaccccctccgccagtgccgagaccgacgccagcgacccagcgtccgatgtcgttgacggcctcctcgttcgcgcgctgctcgcggtaggcggcgaaccagtcgggcttatagactttttgcccgcgactgaaagggccggcgagggagtcagtgcgtccacctagcagaggcgaaagaggaggaccaggcgcactgaggcatcggcgacggcagtgaggccagaaggccgcggacggtcgtattgaatgcgtaggcgatagcgaccggcgatgactgccactgcgagtcggcgcgaaggggggtcagcaggcggcgtctcgatccaaagaaacgcggcaaacgcaccaaatcgtcgtccgtcttgagcgcgtcactgcggctaaggacctcgatcgagtcggcgcattcgtcaatgtcggagcagaagacgggatagttctgatggaggtagaggttgaagaggcccgtgtcgaccggcgcctccttgaagagggtctgcggcgcggcagacgggctggcatcagcagccagacgatcgcctgcggtcatactagggcacgcacctctacgtcgacctttgactgccgtcgttcggactcgaacagatgcgccggaagcggaatctgctctggcggtaaaggcgggtagtcctcctcctcgccaacttcctgcgtcggatctcccagccctgcgggtcgcaagagagaggtcagcttggaaaagtgacgtaccactgcgattgatcgcacgcttgttccagaggaccttgccaagcgcatggaagaggacgaggctttgctctcgacgagtgacggcatcgagcctgaaacgttatcgatcgcgtcagtctacagagatgctgctgactcaactcgcagggacgcacagcgatttgagagccttgtctgttccgcgcgggggcttgccgccccgactgccagcgcccgtcgccttcttggccgccgctgctcggccctgtttaacctgcgcgcgacagagaaactgcagcgcgttgacggccgagcggacgtcgccctgggacgagtggacgatcaactggatcgcgtcttttggcggccgcttggcggcaactggtacggccaggggcaggatgcgatttagcgccttggccagcgatgtcggcgggacggcgttgaacctggaaatcgcccaggaagcgagtgatgtcagcacatgtgatcagcagcgctctgctaagggtcgggacgtacctgacgacacgaacacccgctagcgagaggacgtccatgcccaagatgtcgcgccagccccaaccgccatcctggccgcgctcgccccagccctcgctcgcccgtcccgtctctcccgggtcgctgatgattaggacgagcggcgcgccgccctcactctgcgcaaactgttgcaggagcgtctggaaggcggcgcgggtctcgcggtgtccgagattggggagcgcgtcgagtaggagaatcttgcgccgcgccccacgggcctgcgtcgacgtcgatgcgaccgaggacggaccgggcagatcgagcgacggcaggctcgaccgcatcatgaacgcctcaaggcgaaagatgaccgtctcgcgctctgcaagggtggctggtgtcagttcttcagctcagttggcgtcagggatgaagctgatgacacgcaccagaaccgccgccgctcatgccccactcttcaaagccctcggcccattcgagcaggtcgcaatccatcgcttccgcaacagccttaatgcacgccgtcttgccgacgccagccggacctgtcaaggcgatgatgcgctggaaggaaagagccgggcgcgcagccgtcaaccaacgcgtcctcagtctcgaaagcacgcagagtcagagcccgcaccctgtaccgactgatcttggccgcctgcgagtttgccgacgaggtcaaacttgaagggagggcttcggcaagccagtctcggacctcggcgaccttcttcttgttgatggcgaggtcgtcctgcgcaaccgcagtcaggccgcgtaagggagacggtcagcatcgcaggcagagaggagcacaagggcgagcacgtacaagcgttcgcggcgcatacacgtctgtccaaagctgagcgtcgacctgagcgtcggcagcgcgtcctgaaagccgtcgtccgagcgagcgccggcggtcagtgctgcgggtcccgagctcgaccccctgaactgccgctgagagcctcgcgccgcacctttcgccttggcaagcacgacctcagcctttgccttccccttaccggagctcctgctcgccggaggagccataggccgcgacttgcgagcgctgctgcttccttcggcctcgctcgagtcaaagatctcttcaacgtcggagtcgagctcgatcacctccaccttacgtttgccggtggcggccttcgacgacgatgacgacgcgccgggcttgctgctgaccgacagtggactcggaccgaacgagagctgccaagcgaggagcaacatgttagccgtcggctcgggcaagaggggaggctagctaccagtgggggcaaccgcagcgccgttcgtggcgctaatcagccagcgagacgagttgacgcaccgtcgagagcttcttcatcggcttgcgctccgccttgactgacggtttggcctcggcctcagccttcttccgcggcggcatgctggcgggcgagggttgtggccgagcagaggcgtgatggctggtcgatggaagcaggcaggcgcgtgccgaccgacggagttcacgactgactccgcgaggcacgcgtcgtgcgtcaacaggctggcttgctgcagactctttttccatgttgccgtcgctcggcccacagcgctcagaccctgccagctcgtacagacgggatcaaggaccctccgcgcggtcatatgcagtcaagtcatgagagattcggccgggagagcgcagaggtgtagggagacagggcgagagatggtagacgggagggggctacacaaatagtagaggcaacggaacatcgcgcttaggcgttgtaggtcgaagccgagacgttgccgccgcgaccggtccagttgacgtggatgtccttgccggtctggaggcgctcgttctccttgccggggaggaccttgaaggtgtgggcgccgaaaaagtcgcgctggccctggaggaggttggccgggagcgtctcggaccggtagccgtcaaagaacgagagggcggtcgaatgggccgggatcgggaggccccagatggtcgcctgggcgacgacccgccgccagccgggctgggcgtcggtgatggccttggtgaagaactcgtcgagcaggaggttctcgagcttggggttctgctggaaggccttagtaatgtcgccgaggaagaccgacttgatgatgcagccgccgcgccacatggcggcaatgccggcgttgttgaggtcccacgagtactccttggcagcctcgcgcatgagcatgtagccctgggcgtacgagatgatcttggaggcgtagagggcctgctcaaggtcgtcactgtgcggagaaagataagggtcagcgatcaaggcctagctacgaggcaaagcaagcgcgcaagggactcacatgaactgctgcttgtcgccagtgaagggcttcttctccgggccggcaaggaccttggaggcacggccgcgctcgcccttgagggccgagaggcagcgcgcaaagacggcctcgccaatgagcgtgacgggcatgcccatgtcgagcgcgttgatagccgtccacttgcccgtgcccttctggccggccgagtcgagaatcttggtgaccatcggctctccgtcgtcgtcgttgtacttgaggacctgagcggtgatgtcaatcaggaacgagtcgaggacgccggtgttccacctggagcaatacggaaagcgtcagccggaagtgcaggtaaagaggccggggcaagaagaacgcacttgaggaagatgtcggcgatctcagactccttgaggtcgaggccgcgcttaaggatgtcgtaggcctcggcaatcagctgcatgtctgggcgagcaaagagaaagggaggagggagagtcagcaagaggcgttcgtctgttgccgaggaggcgacgcacctccgtactcgattccgttgtgaaccatcttgacgtagtggccggcaccggtctggccgacccagtcgcagcagggctcgtcgccgttggggcccttgatctgggcggccgtcttctctgttgagggccgggtaggagggacgtgtgaagccgtcagcctacgtcggcggtaagtagtgtcggtggcgagtacggacggaagatctccttgatgtgcggccaggcggcgtcggagcctccgggcatgagcgaggggccgtggcgggcaccctcctcaccgccggagacacccgagccgacgaagaggaggcccttggcctcgagctcgtgcgtccggcggatcgagtcggggtagtgcgagttgccgccgtcgatgatgatgtcgcccttgtcgaggtggggggtgagctgctcaatgaaggcgtcgacggccttgccggcctggacgaggactgttgggggagacgggcgacgtcagcaggctgaaaggcgagctgagcgggccagtgccgccgaggaaaagaaaggagctggcggaacgcacggatgatcttgcgggggctcgagagcttcgagacgaactcctcaaccgagtgggcgccgataacgttggtacctagcagcaaagacggtcgaactctgtcagtgaccagagagttggggagaactgcgtcggcagcgcgcgcgcgcgtgggcgcgcggtcgcgaaaagcaggggggacggacccttggcctcgttctcaaggaaggcgtcgaccttcgagacggtccggttgtacgcgcagaccttgaagcccctggaaaagcgagcggagcacgtcaggatgctatcgtcgtatcggcaagcaaaagaggacgaacttgtcgttctgagcaggcgggtgacgtgtcgtgtttacgcaggcaggagagcagccggcgacgagaacgagagcgtcagaaggccagctcgcccggcaagcgaagggcagccgctccgacgagcagctgaacgcaagcagacacgcaccatgttgaggatgaggttctggccctggagaggtcgaaggaaaagagcagagggcagacgtcagcgctctgtgcgtcgcgatggcctgaaaagacagcggaggacgaaccatgacggcgaggccgatgagaccgatgtcggcactacatgtagcggcgcggcggagaagggcagggacaggcattcggatcgtcagtcgagttgtaggggtgggaggcagaggcagcgggccgtcgagtgctttcggccgctcaagcggcggcagtggcaggcagggcccatctcgaagccgcctggacagcggcaacggcggttctttgcagactggcttgacgccggcgcactggcagaaattgaggccaggggagggctacgcacagctcgttggacatttttggtaaagtttggaaaggggagggagggcagggagagaaggtggtggttggaggcgtcggaagggaggagtggcccttcccttcttttcgctgctgcgtctgtcgctcgtcagcccgccgagaggggggccccagaaccgaagctgagcagtcgaatcaaaggcactcatcagcttgagcggaggtcatccctatttctcgcaagagtgtacgagactctgcctgcttgatcccatcctccccttgctctgcttcagcccgcccgtattcactgtcatctcctctcgttcggaggggaaaaggcaagttgcccccgaccgcccgcactttgctatcgtccggaccggcccggccggccgcgcacaacagcaggcaaacgagccgttcgcagccgggctgcccggtgcgagcttctgctgtaggcagaagcgacctcagcctctcgacagcgagcggaacccggccgcaccctcctccgcacacgcacgcaagtcggctgggaccggaggagccctccctcgcacgcctgcaagctgcaggcggcccaatctctttcttgacaagctctgtttgccggccaagcacgacagacgcgacggaggctgattgaggaggcaacgcaacaggctttgatacagttcaggatgaagatggaaagagaagcagaccgagaagaagggtagggtccggccagtggtcttgcacagcagagggtggccctgccttgcaggcgatgaagcacttcgaagcaaggacgacaacgtgcggtcggaagtcgagcatccgacatgcgatcctcgcgaaggcagagactcgactgtcgggcgcgggttgtgaccgggttgcttgtggtcagagaccaggcccgatctgtttgatgacctggcgttgtgcggttcgacgtgttcgcaagggacggctgatcaccagaggtcgagatcctcaaaggtgccctgggggatgtgcaagggcgcgcggtcagcctcagccctcaagcgacccattgtgagagaaggccagagactcacatcgcgcctcgcctcccagtagccgcccttgtagacgtacccctcgccatcagccgccttttcgaaaaagcgcggcgtccaccgctcgccgcggtcctcgcgcgcccgattccgcgcacgctgcttcgtctcgagcgcgagcttggcccgctcggcctcatcgagccggccttcttcgagcgcccgctgggcggggttgaagcgcgagtcggagcgcgggaggaggtcggcgaacgacgggtggagctggttgagcgccatggtgaagtaggcccactgccggcgagacgagtgaagataagcgcgtcagtccagccgagagcagggaagcagcgtcgacctgtaaggagggactcaccccgtaatacttttcggcgtccggcggccaaggatgcgtctcccagagcaggtgggccgggtcgtgcggtccgtacttgatgtcgagcttgctgtcccacttgccgtcgatccaggccacctttttgcccgtcgccgccttcgtgacggtcccccttgaaacagcgcatgagagtcgtctgtatcagcgaagggcatcgcgtctgccaaggagaataggcttaactcacgaaaccacgttgcgaccgccgccgccccagccgccctccttaaatgtcagccggcacgtatcggactggtatggccgaagcgggagacgtcagaaagagggagcaacacagagaggaagcgcaagacgcacggtggtcaggttgacgacgtccatcgtgccaatcgtctcgagatactttgtcccggcgactagattccggatgtaggagctcggcttctcatatcggaagcgttcgcccgtccgctcgagctcgacaaaggtcgcgccgacaggcgtaatttcgagcgacatgcccgcgagcttgttcttggccgcgctcgtctgccacatcgaccagccaggcccatcggcgtgcgaggcaatcaccggtgggtgatgcgacgtcttctcggcaatgaaacggatgccgtcccgaacgagttcgaacgtctcgccgagcatcgggttaaacggcttgcgcgacgagcgatagcgcgagctcgcgtagctcgagacggcaaaggccgcgacgtgcgagagccgctcggccgggtcgacagcatgggcggcgctgggcaggaaaaaaatagacagcgtcagcgaccgagcagagctatcggcgagggcgacggctgactcacagcgtcagcaagttcgagtactcgacctcctcggccgcccgctgaaggagcgagatggcctcgttaaacgtgaccggcatcgaaatctgcgacatgtctttgccgacactcttgcggaggaccgagatgaggctgccctcgtccttgggcatcggcaccggcagctgcgtccgccactggacgaccggcatctcgacctcggctggaccggcggtcgagtggcctcggtcgatcgagccctccggtcgagcagtctcgtacgagaagcgtgacgcctcgggcgcgagtggacttgagagggcgagggaggaagccgttgagtcggacgccgacaggctggctgaccgggcgtagactgatccatgaggcgatgctgccgggcccagcaggacgctcccagcctcctcgaagtcatcgtcgtcgtcgctgctgccagacgagctgtcgtcctcgacaggaacgtcgacctgcgccagcgcggcgtcttcctcggcctcgtcgatcggctcgtcaacctcgggcataagctcggcgtcgtaccagatgctgaggacgctcgacagccggctcgacgtcgacgccgctcggtgatgtgtgcgcagggccggcaggtggtcgtcgtcgtcggcaccgctcggcaggccagcgccgagcgagcgcggacggttcttttgctcgttgtcgccgcgcaacgtgccagcctcggagctgtggcggccggcaacgccgaggcgatactggtcaaagtcagagaggccggccggctggttcgctcgactctgacgggcctcgtcgagcagcatcgagtgcatggcgcggaggttgttgagcgacacatcaagttggtcgatcgccggatagaggtcagcgaggatggagggtgccgccgcgggatgcgagatggacgtcgagcgcttcgacatcgagggtctcgacgcgtccggggatggaggcgggcccgggatgggaaggaagatgtggctatggcgcgagaaggccgaggcgtttggcgtcgttggatcaaagggagatgaaggaagcggaaggccagggaagccggcgagcgtagaggagcttggagccgtcattgttgtcggtgaggccggaagcagatggacggccaccgccaggccgcctatcggcagcggcggcacaggcggtactggcggcgcgtgatggctgcccgaagacgctgtagcgcaggcaggaatcgtcagtcaatatgcgacctgacttggctgaagcatggactcgcacgcgacgcactcttgcgaaagatgccgcgcaggcccttgtgcttgcccgacgagctgccgaccgtcccgctccgttcgcgtccggtgccagtcgccgacgctggcgagagcaggtcgcccgacccattcgctaccgccagaggccccgtgagcggtgtcccctcgccaacctgggagagacctggcacggccggatctgaatgatggcgagctgcgaacagggaagagcaccagtcagcgtccaacaccggtcaatgtcttcggcgcagccagcctgcgagccgggtctcgcacctggcgtcgccggcttcttgtgcgagctcttgcccgatttgagcagctcggccgccttggcctcctccctcttggctcgccgcacgacccgttcgcggtccttgcgctccttgcggagcttcttgtcctcctttttctcggacgatgacttcttgcggccgtgcgccgagaggaggttggtcccggcagcggcgccagcagcgagtgcggccgcccgggcagcccgaaactctggcttgatgaccgcgagcgcgacctccatttcggtgatggcctgcaacaggcagatgactctcaatcagctttctgctcgtggctacccttcatggcgtgcgatggtcgacggtttggcggcgagacgcgcgcgagcaacacggccggacgcgccccgagcctagcgaggacgcaccttgtccatgtcggccaggagagccgagtgggacgccatgatgacgcgtgtgttctggtgcagtcttgctccgcgctgagtacagggttgggagtcgctcaagactgagagattgcgagggtgctgagctctggagcagcgtgagccgaggacgcgagcgaagggacgtcagcgtcgacttcgaagtccagccacagtcgttgctcccggacacgcacgacgccggagatgccgttcccgtaagacgtctaaggtgcctgttgccctcgctgaggtcgtctggaagagggagctgccgaagagaggtcggagcgagtgactgtcgggcgccgccaaacgggttcggtcgggcgctgccttcgccccctcgacagcatccccgtctcccgaccttccctccctcttgacgcagcaaagcagcactagacgacgctgtggctgtcactgccttcaggaatcgagcaaacgccagccatcgccccagccagggagtgagcttagtctcagttcgacctgactgcgggcaacgccgccgcctgcgcctcccctctcccggccgtcgattgctgcagcggaccatctcacccggctcggcctcgcctgccacccggccaagatggacctctcgagcacgcgggagctctcgtttggtcggacggccgacgttgagctgcccatctcgttccggctcgctcggctcgagggccagattcccaagaagacgtaccgggagctggaggagcacccagagtggcagcacctcggcacccagcagccgtgcgtccggtcccatcagccttgctcagacttattgtcgctgatcctgcaccttgtctgcagcggcctgtcggatctctacgtcacagtcgagctttggtccgagggccgccggctgtcggtctcgcaacggacgcggcacaagacgttcgccaagtcgtatacgtgcggcccccgctttgctctgccggcagactgcgatacgtcgatgctgaccttggggcacaactgcactcccactgacgggccaggtggaacgagtttttgacgatcccggtcaagtactcgtcgctgctgccgacggcgcagctcgcattcaccgtctacgactgcatcggcgccggcaagccgacgcccgtcggcgggtcgacgatgcgcctctttgagcagccagggtccgtctacgggaagcctctcttcctgcccggctgagactgagcgctgactgaggtcttcgccgacagctaccttcgacagaccgaacagcggctctacctgcatcgcggggtcgctgcggacggctcggccgagtcgagcactccgcacgacgtcgacctcggcccctcggatgagatgggccgcctcgaaggagttagtgcaccagaagcatcgtatgtgacgcgaccgcagcgtgtctgacgcccttctcctttccagctagtccgcaaattcgaacggggcgacatccccaagcttgagtggctcgaccgactgacgttcaaagagatcgagcgggtgcatgcagtgcgtgattggcggctcacctagagcgagcgaacgtcctgggtgctgacctacttgccgaccccatctgcccaggccgaggcggccaagtcgcctcacctctttctctacatcgacatgctccacttcgactttccaatcatctttgccgagccggtgcgcccacttactgctatctgagccttgtatgacgtcccttgctgaccagcttccgtcgaccttgccaggaactgccactcgagccgccgtcatcgtcgatcagctcgctcccggtcgcgcctccgacgccgctcgagaacgagctggccaacgtcttcaagatctatgatccagacgccgatcgtgagaatctcgtcgaggccaagcaccgtcgactggtccgcagtcagcgcactggccgatgggaccgcgagctgaagccagatgcaaggtctcgggacgagctcaacgtgtgtcgacgcagaggtggtcgagacatatcgctcagcgctgacaagcccttcctcggtctccagttgatcctgagctacccgccgacgcacccgcttcagtcggaagagaaggatctcctgtggaagtaccgcttctacctgacgcgcctgccccaggcgctcacaaagtttctcaaggccgtctcgtggaacgacgtcggcgaggtcaagcaggcggtcgaggtcctgctgccaatttggaccgaggtcggtatcagcgacgcgctcgagatgctcggcccgggttcccgcgacggccgcatccgggctttcgcggtcggcgtgatgggccgcgcggacgatgaggtcagtagcgagccgaccgctcacaagagctgtcgcacggactgatgaactcccctcacgcgtcaggagctcctcctttatcttctgcagctcgtccaggctctcaagtttgagccaccaccgtccgacgggcgatcgttgcggtcatcccactcgaacaccggcacgaccttctactcgccttcgtcctcgggcacgacgtacggcgcctcgacgccagggaccgctggcggcctcgccctggccgacgacagcggtctcgccgactttctcgtccagcgcggcgtcaagaatgcgatcctcggcaacgcgctccactggtacctgatggtcgagtgcgaggacaagagcgagggcggggcgggcaaaatgtttgcgcgcgtcgccttccgcttcatgactgagctcgtcaaggtgcgacgacgcgtcgctcgcaatttgtcagttgctgcccgccggatgctgatgcgacctgccccctccagatccccgacggcgcagatcggcgcaacctgctccgacggcaaggcgagctcgttgcgaccctctcgggccaggcgaggcagctccgtgcgtcaaaggacaagcgcgagaagaagattgagaagctgcgggcgtacatcgccgactcgaagcacggcctggcgagcatggcgccgctgccgctgccaatcaacggccgcatcgtcgtcgacggcatcgacccggagcgatcgaccatcttcaagtcgaacctgcttccgctccggctctggttcacgtgtccaccctctgccgtcgagcaggaggacgagagcaggctggggaccgatggcgaactgccccggccagagtacccgctcatcttcaagaatggcgacgacctccggcaggaccagctcgtcgtccagctctttacgctgatgaaccggctcctgctcaaggagaacctcgacctccgcatcaagacgtacagcgttctcgcgaccggcctcgaggagggcatgatcgagtttgtgccgagcctgacgctcgcggccgccatgtcggagcacggcagtctccaaggctacctccgggccaaccacccagacgtcggcagcccggcgacgtttggcatcagcccgcgcgtgctcgacacgtttgtccggtcatgcgccggctactgcgtcctgacgtacatcctcggcgtcggcgaccggcacctcgacaacctcatgctcgcgccggacggccacttcttccacgtcgacttcggctacatcctcggccgcgacccgaagccgttcccgccgccggtgaagctttcgcgcgagatgattgacgctatgggcggcccgctctctgcgcattacctccgcttcaaaagcctctgccacacggcgtttgcaaacctccgtaagcaggccaacctaatcctcaacctggtcgggctcatggtcgactcgggcgtccaggacattaagctcgagcccgacaaggccgtcgccaaggtgagccccctcgggcgagcgctacagtctgcccggccgctcatcccctttacgtcatcgctgcccgcgcgaagatccaggacaactttctcctgcacctgacagaggaagaggcctcgcaacagtttgaggtcctcctcaaccagacgagcgtcctcaccgccgtctttgacgtcatccacgactggtgcgtcacacgctctgcctcttctcgaaacctacgaagcttgcagataggctgacgctaagcgtccgcgcgttcttgctcagggcccagtactggcggtcatgaagcgctattgcaggacttcaggacgagctggattcaatacggccaagcgacagagcggtccatttcgacataattccgcgagactcctttcgccgagtcgccacatcccgcttcgcaagcagctttcgcccgtgcacccgaaagagtgacgcacctacgctcggccatgctgagcgactacgctcgacagatgacggtcgacgacagacgtcaaggtcgttctgcagccagacccgccagtagggcgtctcttcgagcgcttgacactcctgcagcatctgctcaatcgcatgtcgctccctcctgcgcgcgacacagccgtcaccgcccggataagccagagctgcgcatcaatcctcctccatctcgtcgtcatcgtcgtctgcccagtcgagcgcgtcctcgccctcggccccctcgagctcgtcctcgtcgacgacgccctcggccggccggatgccggcctggtcaagcgtcgcgaggagctcggtcgcgtgctcgagaatctcggccgtcgggtgctgctgagcttggtgcagctaggtcggaggcaacgcgagggcacgacagccggtcagcgaaccgccatcgcaaggaggacagccagaggttggagggaaacgcacaaggacgcagacggtgagcgactcgcgagcctcctcccagcactcaattttcgtcggctccgtctctccctcctccaacgggcccatctcgagccccgccatctccggctcgtcgcccttgaagatagccggcagctcgccgctccccctaaggtaccagatccagccctcgagataggccgcctcgacatcctcgtcgtcctcgtccctgaccccaccgagcacctcaagcgcctgcctgccaagccccagctcggccatcagccgcgcaacggccagccgagtcgcgctcggcgggagcgcgagcgagccgggaaggagcgctcgccagggcgcccatgcgcgcgagaggcacgcgagcgcctcgagcggtgacgattgcgagagccggaccgaggcgagcgtgagccaggcttcggggtcggaggggacgagcgagagggccttctggaggaagaggaggcacttgtcctcggctcctggctccatgctggcgggcagttcgaccaaggggagggaagatgtcagcgaccgcagcagactcgcacgctagacagctttgcacagcgcgcgcgcgcacacacgcaccagaggtccgtcaggtagatctcggtcatcccgacgagcgcccggcacatctgcttcctcagctcgtcctcccctcgctcacactcctccctcgccgcttgcacctcgcccgcgtcgcccgcggggagctcgagccggagcttgacgagctcgccgagctggccctcgagcagcgggatcgagcgctcgtagttttcgagcgcgagcggcggggtcggggcgagttgggcgaggtagaggtgggccgagggcgagggcgaggggccggaggtgagcgcggtgaagtgctgcgacggcggcgggcgggcggcgcgacaggaatgagcgagcaagagtgaatggcagagggagtcagatgtcgcgctttcccctcgctgccagaaacttggcctcatgcccggccattctaataccgacgcacctcgtaagccgcctggacgttgcccatttcgagctcgcagacgccgaggagctcgcgcgcctcgctctcgcccggcgcgagcgcgagcagccgcgagaggagcgcgatcgcttgctcgtagttctgctgggcgacgagcgtgtgcgatttggctgtggtatcatggagagaggctgggggttcagctcgctgcgagttgctcgtgtcggagagggctaccaggagagaagggaacacgacgcacagagcaggtcgtcgacctggccgctgacatcggacgagccagaggcggccgtgcttgagccggcgactggaccctgggcctgcttggcgcggttgcccttcttgttctgctttgtgcggcccatcgtggtgtgagagaatgaggtcgtatcggtcgagagtgagcaggcgtgcagggcgggctgcggcccaaatcgttgctagggttacggctgctcggaggcaacgtcacttggacatctctctctctctctcgttcccttcagaccaccctctgcaacgatgtcgcacccgccctcactcctccagacggccctcctctcgtcaaaactccacgcacttgacctctcgccaggccggcgccaacaccggcctctcgcatccgacgacggccacgactcggaagatgaggacgaggtcgtcggcgtcgagacgcccggccgggcccagagcccggcgttcggccagcgctcggcgtcggcgagcaggaagcggctgagcagcggcttgcccggtggtgagctcgctctacagcagcagcagcagcaggcgaggagtaccgacccgctccgggcgttcccaaacgacattggtccgtccgaccttccccactctctctctctcttgggtctgtgccgctagtgcgcgatggctgacgccctatctcccctctgactgactggcccacctcggcaggcattcagatctttgcccggctcgacttcaagtcgctcgcccgctgcgcccgcgtcagcaagcgctggaaccagtcgcagacgatcaactacagtccgttgcctaccgcgctcttcctctgccgggggctactaggtcccacttggcactgacacggccttgcttccgccccccggccttctaacgcgccgcgctcgctcagtctggtaccgccactttaaagagcatcagttctcacacggcgaagacgcgcacgagatgcttcgccgtgcgacgcggtcgagcgggctcgagacggtcccaccggcgggccgctgggggcggaaggagtcgaaggatgactgggtgcgtcgaccgttccttcgcttggctctgtgccggaagatacgctcgcgcactgtgtcgtcagcggggcggcgcgcttcggtcaatgcggcgcgactgacccgcccctcctcaacctccatccccccccttcccagcgccgggcctacaagctcctgatccacgcgcccccgacggccaacctcgtcccctacgacccggtcgactcgccctacgcctccggcccgccctcgccctccgcctccgacctgacgcccatcaagctcggcccgctcggcgcgcccgtcagctcaaagaacgagagccgcgaacagtatcgcgagctcaaggggcgcaagagccggctcaagcgtgggatgggaggcgtcaacgcgagggaccggacggtgacgggctttgatggcgtccaggaggacccgtacggcgatggccggtttgacgcgccgttttgaaagacggcgccgacgacggccgccgacggccaacgacggccagtcactcgaagccctacggtttcacacagaggccacctacgcatcctgctctgcccctggacctcctctatctctgcccgcccttcttccctccctccgtcctcgatgagaggctccaatctgcgccctttgccaacctcgtccttccgacacacctttgtaacccatcctcccatccgcttgccactacttatgctctcgctcttcccttccttgcgcgtttggtcgttgaacggctcggtatacgagaaaggcatgggatggcgatcgattggaggtgggatcgcgccgtgcgacgggcagcgagcgaccgcagccggcgacaaggggcccgactcggccgtctgtcagacaagaaggggcgcgcgagcgatcgcgggctggcgcaggagaaggttgttgctagcgtctgggttgagcgaggagctagcccggtgggcgtcctcaagggcggttgtcgatcggtgcaacgatcgcaccgttgaggaccgatggaggtgtagagcagccgtcaggttggccgatacgaccagacgacctccgtctcgattgagcgtcctcgtgcaactctgactggccaagccgtcctcacccaaagcggcgagaggagagctccttcagatccaagggcagagcgcagcaaccgcacagccaacgacgacgatcacgaccgtcgctcgtccgactggccgacgaagcgcgaagccgtccgacgtgaggccactgcctgcctcctggatcgatacgaccgaagccgaggccgaagcggacgccgcgggaccgccgccgccgccgccgacgacgacgagcgccgtcgccgctgctgccggcagccgaaccgccggcgtcgactttgacgcgatggccgttgctgcgcctgcttcgatgggcgtcgtcgttgctggtgggtttggagcggggtaggggaggatgtcggcgagggcggagggggcggaggagaggttggcggcggagcattcctggaggaccaggaggggagccagggccgggcgggggtggcggaccggcaaaaagggctggctggctctcatagacatgggttctgcctctaccgcttgcgctcgtttgcatcacgtgtaacatcgaggggttatgaatactcgccaaacgacccccgccccttaagcgctcttccgcgcccgctccgccgcgagtgccacctcgcgcagcgcgcgctcgcgccggacgagcgcacccatccgccagccgaggacgccgagcgcgaggccgttcgtcgcgtagcagacggtcgggccaaggagccagtaggacgtgcaggctgcaggtgggtgggggttcggacaatgcaagcagtcagcaggatggccgcaatcatgctgagagggaggcgggggacgcaccgaagatgggtccaagcgcgcgcccgagctggccggccgaccggaaagcgcccatcgtccggcccttgacgagctcgctcgtcgcctccgcgtcggccgcgtccgagcagaggacgctcgcgcccgcattgaggccgttgacgacgctcgcactcgcaaacgcgaggcacgcggcgcctgcccagagggcgagcccgccgcctgcagagcggtcagtgaagggcaggtaggcgaggaggaggaggccgagcgaggttgcgaggacgccgcggtgcgagagggcgagcggcgcagaggcgacggagggtcggcgggtgtagccgccctggagaagagaggagaggacgccgatgaacgagagaagtttgcccgattgggcgttggagaactggaacaggtcgtacgtcaggaagctggcggagcgggcgagtacgacgtcagctcgtggtcttagtcgaaatcgagatgctagacgagcgactgacgtgagcgtaaactctgcgccagagaagaagaagaggtaggcccggtggaggctcttgagctcggccagtgcccgcttacgctcctccaggctccgcacaggattctcagcctgctttccgacctcggcctccttcgccgagaccggggcgccctcgatccgccagcctttcgtctcgggcaggccgaacgcaaggtaagctgtctcgagcgcgaggagaccgagcgcgatcgctgcgggcgtcgcgtagaggttgagctcgcggccgccaaggagcgtcgagcctggcagagggcgggttgcgaaccaggcgccgagcagggggccgaaggtgaagcatagcctgtgagtggctttgtggtcagcactcttgaaggcgagggtagatgaaaggatagggagcaggaggacgcacgagaaggctaggccgacgagcgcgagcgcgcgcggccgcgtcgccggcgtcgtcacgtccgacaggatcagaatcgacagctgaacgttgccctctgacaggccaccaacgagccgggcaaggaggaacgaggtctaagagcggcgcatcgtgcgtgcatcagccggattccgagttggtcggagacgagcgtcagtcggtgactgacgaaggacgtgctctggagccagaggacggtcgacaggagattgccggccatcgtcgcgagcaggacgcgcttccggccgaagcggtctgcgagtcgaccaatcgagggcgagatgaggaattggcagaagctgggcggttcgataaggggggggttgacgggtcagctcggcttgagcaagctcccttcgaacgagatgggccggaggcagtgtgagctcgacgatggacgcacgagaagaccgagcctaggaaaccgccgagcaggacgacgtcccacttcttggccgcgacgccagccgcgagcgggtcggccgctgcctgggcgacgggcgagaaggacgacgagaggagcaggccgcggaaggcgcgcagggcgctgaggatctgggcgagcaggtcggtcgacgtcgaccgctgcgagtaccactcaatgatgcctgcgagcgggtagattatcagctcgttccatcgaggtcagagatgctccaactggcacgaacgagggaagagtgggagcgggatgctagcggacgagcaagggaagaacgagggtcagcgaaggcacgcgatggcgcgcgggctggcaggcaaaggagcggccggacgtgaacgcgagcaggtcgagcaggagcgccgtaaagacgaggaggatgacacggcgctccttcgagaccgtgcgggctgctgctgtcggagccatggtccgtcaatgctaggtgatggtttgagagaaggtggtggtcggggtttgcggcgaagggcgaggagctgcccggtcgaaccaaacctcgcaatctaaactgacaagcgtcccgtgacaaccccttcgtaccctccctctgccggttgcgagcggtcagttcgacacagcagcggtcagctagaagttcaacgagccgcggtctcgcaggaacgaagaggcaggacgtcgtgagagaatcagaggccaaagctgttgagaaggccccggccaggtttccctgactgggatgcccaagcccggtctaggctattctccaacgagccgcagcccctgcaccctctgttccccctcccctttgttcgaccgacgacgaccaatctcatctccgccagacctcctcaagtatcgtctggcagtcagcaggagtcctgcaggctgctcgttgcaccggtgcgtctctcgatggcgacgagccgaagcggaggccctcccgttcagctcgagccgagctgacatcctctcaagacccgaactgctcgcagcagcccatcatctgccctgccggtccattcctcaacactcgagaccagcttcgacatcaggattgcgcacgtccacctctggcggccatgttgcgctctgcgactgacgaaaccaggctttcacatccgctgcagccaggcctggcagcttcgaggcgcgccgcccgcgagccctctcgtcgcctctaacctcggcacctcgggtcagcagctcgacgcctctccagcctgatgaccgctctcgccggaccgatcaagccggatcctggcgtctcggcatccagctctgcgaccgctcctcgtgctctcgcccggccaaagattaagcgcgaccctgacgactacggcccgaccgtccctctcgcgcccgactcggacgacgacttcaaccccgcgccggccggctcgcggccacctcgtaaaagggcggacgccagtccagctgcagcgagcacgcttggcgggcgcaagaaggcgcgatcatcggtcgcgctcaaggtggagccccgccggttgaggtcgagctcgccgaagaagcgcaacgcagccgccgcccagccagatgggtcgaagcgctttcgtttcggcgtcgactcgagcgacgacgatgacgagcagcccggtccttcgacgcgtcggtccgtagcgacaaacaaggttaaggttgccgctgccgccaatgatgacgacgacgacgacgactcggatgactttgaccgtgcggcgcgcaagaagcggccggccaagcggctgcacatgcggacggccgtcaagcgagaggcggccaacccgctccggctcctggcgggcaagagccctctatccgactcggacgacgcgctggaggctgtcgcggagacgcgggcggtcatcggagccggtgggatcctgcggaggatcaagatcgaccggccgccgcccgcgagcgcaaaggggaaagagcgggaagttatcgagctcgacgggagcgatacaggtgcgtaattaccttgcttggagagttagactgcctcgctgacttgtctccgcctttttgcctgcgacagaggacgactcggtgaccggtgtcgagccgagcgcaccggctcctccgatggacgtcgacgacgattcgtccggctcatcgtgcagttcgggttcgtgctaccgctgtgtgcctcctcttattacgctgacggcctcgtgcgtcccgcagacgaggacctcgactttgcgctcaagcttgagcaccgcctaaccgagaaagcactgcacggacgcatccttggccatcgcgagcgccgcaagctgcgtcgtcagatcgcaagggtcgtcccgaccatcgtcaaggtcgaggccgaggcccagccggcggtggcgatggacgtcgatgggagtgcgaccgaggacgaagactgtgggtcggccagactgcgagcgaagggaagttagccgtcgctgacactttctctgccctacagccgacgacggcgagaagacgctcgaggagatggccgccaaggtcaagcgtctgcgcgagattagggctcaggaggacgcgctcgctcagcctgcgctcgccgctgcagggccgatcgtcccccctccgctgccagcaccgcccgctttgggctcggtggcggacgccgcagtcgctggcgctgagccgtcggttagcaatccttccgccttcgacgcggtcatcgagccgccttcgttgcctcagatcgagcacaagccggcgttcgaccctccggtcgcccagcaggcgctcggccctctcgtcctcgaggccaacgccgacggcacaggcctacctccgacgtttgtcaaccggcatatcaactgccagctgcgcgagtaccagcgggacggcgttcgcttcctatggagccggtaccgcgacggcaagggcggcatcctcggcgacgacatggggcgagtcgtgcgcgatcaaagcagatcatctcgtcgggcctctgacccgttcttgcctcttgcccggtcagacttggcaagacaatccaggtcatcgccttcctctcggccatcatgggcttcagcggcgagcggccgaccgaccacaaccgcaaggtccgctgtagtaacgctcagctcgccgtcggccggatgaagaagggcattcacctcgacaacccgcggccgaacgaggagtggccgacggcgctgatcatcgctccgagctccgtctgcgagaagtacggcccctctcacttggccgttgatcgtcccgtcccgtgctgacttgtcgcgactgttttccccgtatagctgggtccgagagctcgagactgtgcgctatgctctcccttctggcctgtgatcgttgactgacgaagcctgccgctcggctactcgcagtggggttacttcagcgtcggctagttggtgtcgcttcgagctcctcgctacagtctcgatacacgctgacccgacgctcacccctcagctacatcggtgtccctcgcgagcgcggtaagatcatggccgagtacaagcagggctggtacgacatcagtcagtctgctcaaccaggctcgcgtgcaagcctagagcagcagctgacagcatccccgctcggcagtgatcatgagcctcgacacggcccgcaacagcatcgcagactacgcggacgagcacttttcggtcgtcttcgtcgacgaggtgcacaaggtcaagaacccgagggcgcagctgaccaaggcgctcaaaaagctcggtgcgtgccccgtcctgcatcagcgcggcctcgtctgctcctgcttgacgctcactcctagcctttgcctttgaccttgggcctcgcagagcatcccatccgcttcggcctgaccggcacggcgatccagaaccgattcgaggagttctggtgcatccttgactgggcccggccgggcgagatcggcaataaagatgattgggactcgttcgtgaccaaaccgatcaagaatgtcagtctggcccttgttgctccttcgcccagctgctctcgctgacctatcctcttcttcctctttagggccagtcgcacgacgcgaccgtcgagcaggttcttcaaggccgcgtgcgcgcgtcgcagctcgtcacaaagattctgccgcacttctttctccgccggtgcgtatcttcggcgctctctatccttgcggagacggccctgaagacttgcttcttctcgccccgcaacaggaccaaggctctcatcgctcatcagatgcctcgtaaggtcgacaaggtcgtcctctgcgcactggtcagtcgactcacgaaccaggcaacgcgtcggcgcgagcgcgtgctgaggccgacgccttcgctttcgcagactcctcgccagtacgactgcctgcaacggctgcgcgccacgcccgaggttcagaagatgatccacaactcggcaggccaagggccgcttcccgctcacctgcaggccgtcgatgtccgggtgcggtcctcgagcgcctctcaatgtcgaacccctccccccactgatccgacccactcgtcgtcaggccgagatgttccgtttcatcacaatgttcaagaaggtcggtcgcggagcctgtgcaagccttcgctttgcccactcaactgacagctctgtgacgcgacttgccccttaggtcgccaaccacctcgcacttatcctgccccagcccgaagacgacctctttacgcagcgcgtcgcacgttacaccttccagacaatctatcctgaagtcgccgtcgatgacctcgtcgctcctgagctactcgagtcgcggcgtgacctctgcggcaagtgggaggccctcaatcagctgtgcgtccgccctcacgagaccaccctcggtcgctcgccctgatcatcgctgttccgccacgcgcaggctcgacctctggcggccttacaccgactcgaccgagaacaaggtcctcatcttctcgacctcggttcggctgctcaagatcatcgccggctttctcactcaggagggtcgcgagtgcgaccaccgtctgaaggtctttgcccgcaggcagctgctgacctgcttctgctcgtcctcagatttctcttcctgcatggcggcgttccgaccggcgaccggatgccgatgattgacaaatttcagacggacccgaacgtctacgtcttccgcacgtgctgtctcagcgttgacgggcgatcaggttggagagctgactctgttctcgcgcctgccagtcatctcgacccttgtcggcggcgtgtaaggcttcgcgatctctgaggagctcatttgccacgttgaccctcggttcatctccagcggtctcaacctgacggcggccaacaaggtcgtcatcttcgacccgagctggaatccgtcgaatgacctgcaggtgcgtctctcgccatcaagttcgctcgagcgccgatgtcgggctcacctccgttcccgatgcaggctatggaccgcgccttccgcatcggccagaagtcggacgtcgaggtttaccggctcgtcggtaagtttttggcttgcaacagccataaatgcaagctcgctgacagtgtcgcgcctgccctcagcggccggctcgatcgaggaaaacatttacacgcgccagctctacaagcagcagatgtcgagcatcggctacgacggcaagtttgagaagcgcatgtttgacggcatcatcgacgagcgcggccagaagggcgagcgtgcgtcccggaccttcttggattgccaaggttgatgcagatgctgacctcgcgccgtcttttgctcagtgtttggcctcagcaatgtgcgctgcctgcgtcgcatcgcctgttcgtcggcttagactgacgcagcattctcctcacgcagctgtttgagctcaaagaggacgccatcaagaccgagagcatcgtacgtcttcaagagtgcttgcaggcgaccccctgcgctgacgtgaccaccccttgctttggtcttcagctcgaccgcatacgcgatgctgagctgccgttcgctgacccggtcaccgacgactttgacgacgagaaggaagctgtgcgtgctgccccgaccctctgagactgatcaaccggcactgatgcccctcacctcatcgcgacagaccaagaagcaggacaaggacgagctggacatcggctcgctctttgccggcagcgacgacaaggcgagccaggacgaggacatcaccgagctcctgagccatgccggcgcggcctacatatcaagcgacaaggatctcctcggtcaggaggagcgcgagcggcgcatctttgatgagtgccggcgctaccggcgcgagcacccaaatgaggccaaaagtgcgtggcctggcttgtctttcttacgccgccggcatacgctgacgacctgcacgcccgtcgcgctcttctcagacaccaaaggtgagactaatcgtagcactgcgttgctgcctgcgtcagaagctgacctgtcctcttcccagcattctctctcaaacgccagaaggcggagggcgagccggccgccaagaagagcgccgtcaaggagaaggacgcgaagccgctcttcgccccgcccggtgcgtcgaccccgtcaagacgcttcaggtcacgatgttcgatctgacaatctctttgtacctcttccccttgcagtgcgcatcaagaagggtggcggttgaaggcgttcgacgccggtgcccgccagagagccgagcgcccgcttgcccgagtctcctctcgccaatccaatcttccatccgtcgcccggcccctcagttgtacctgtatctgacccatcacaatgcaacgatcctcatgtctttcccaactgcttccattgctgtgccttcgttgcgacttgcttcgacgggggacgacaggccgcgctgccgcacgagccccttctctcgcgctcccccttgaccggccgtgcacggcggattcgggccaaagccgcgccccagcgagcagaggcgcggctcctctgccagtcctaaagtacctttacattcactctgatcgagccaggctagcaactctccgtgagcgacgggccaaagggggtctgtgcgacgctgcgcggcggcgccttcgcaagaaggctcgagaggggtggccgaagccatctcgtccttccctttcgaccccgatccccgcccgacgatcagaacgacaagcagacatggtacttcgcctgatgcctcgctcggccctccagacgatcgccggcgtgtgctgacgacgctgctgccgaacgcttgaccgtcaggagccccctttcgagcaccagcacgagcacgtcgacgaagactggttcctgaccagtccgatcgagaacgacggccttgagtctgacgccagccatgcttctgcttatcgagtccttggtcacgcccgctgtcgatgcgagagcttgggtcgtgtctggcaggctggaaggctgacgctcgcgactcgcaatttcgacttgccatcgtcgagcttgggcctcttcgagccgctacccgctcgacgaagaacatggaatcaaacagcaaggtacgaatagcacgcctctggttgtggttgggttgcgtgcctgatgggcatcacctacaggtaacagcgtcggcctcgacaccgcgccaacggcagctgctccgttcgacgcgctcggccgcccgccgatggacggccttgacggcctcaaccggggatctgattacgcccagtgcccggcaaacgacaaccagtgagctcagaccgcattcgaccttcttcagcccatccgcttactacaagcctttcttgcgctctcaggcctgccccgccgccaatcgtggccgacacgccggaggcggtttactggcgtggcttcgctgacgggcactcagtcggcttcgcagccggtcagaaggcagcactggatcatggccttgcagactcagtctccgctacgtcgcactcgtgagtgccgtcgtttaaggccaggtgcagaggagcagttgccgaccgagcccttttccgcgatccgtgcgcagctcgccgccatacgagcccctgccgcagacgccgcagcatgaggccccgtccgccgcacctaagccgaagaagcagcctcgggtcgagcgctcatgctcacctctgggcagggcgatggtcaagcagaccacggtcaagactcccaaggcagccgctcgcggccgtagcagcgcacggtcggctcgttttggcgcgctcgacgtgagtgcacccagctggctgtcggaagcgacttcaggctgacagtccgctgcagtattactgggaccagatacgctcggtcagctacccaggcgtcaagataacccagttttttgtcgacaactacgctaacctcctcgtcgacgacgactccttcagtgccaaggtcaaggccaacctcgcgcacaagaaggtcacgaccagtcttgtgcccgagccttacggaagacgcgaaggctgatcttctcatctttcctcaggtggacgacttgtggtccaaccaccggcgcccggacaagacctgggagctcgaggtgaaaggcggcgaggctgacgacctcgctgctctttccaagggagtcgagaatggcgttccggcgctcacccgtgaacgcaagactgtcccagcggcggctggcaagagtcagtgcccgagtcgacatgcttttttggcctgcagacagctgacctgccttgtcccttcttgatccggccagacgacgacccctgatgaggcgctgagagtgtgggcggtgcacgctacggcgctgcatcaaaattttctgcgcctgatctcggaccgacgtcttcgccatcgtccgttaggaccagccttgcgtccgcgtcgtgagacggctgaataccatgccccatcttctcctttttcctttgcttcgtgcgccgtcggatcgggagcagcgctcgatagcatcgttagagaattaagggtaggcggggcgggagggatacacatgcagaggaggggctacagccggcgggtcttgagcggaaagaggggcgagagggacgtcgtcgcgtctatgagatgaaggtgagctcgtcaaagatggtgccctcgatgagggtctcctcgctcgcgccagggagcgtgatgtggagggtggcgtccgagacgtgctggtagatgtagggcttcgtcgaggcgacaacctggacgaccttcttgattctgcgagagggcaaggagcgaaggtggttagtcgcgggaaggagatggtcccgcttccgacagcaatggcggcacgcacaggtacggaatctcgccgaggacgtcgaccttctcgatcaggccaccctcgccgacctcgcccgagccagtcgcattctcggtccacgccttgaactcgccgccttgggcgtcggtcccggcccagtcgaagcggacgcgcgacgggggcgtgtagccggtgaaggcgtcggcgacgggcgagaggtgggtcgcctgcgacgtcgtcaacgccttgacatgagcggccgacgacggcgtgtgaagctgcgacgtgaggaaggaaatcttgctgcaaaggaggtgatgggcgagtcgtaccggcgacgtcagctgcagcctcttttgcgtgcgacaaagacgggcactcacttgtcgaggacgaccgcgccaacgttgaccttgttgcggcccttgcccttgccgtcgatgccgtgctcgtccttagcgagcacagtgaagagcaatcagccattcgtgccctccgcgttttgggggctcgggcgcactcacgttggtctcaaactccatcatgatggcgcgcgtgcgcttctcggcgccggcgggcgaggtgaagaaggcaaagttccagcggcgagcaatcaggttgggctgcatgccctggacggcgtgcgagaacatggcctcgccgtcggccgagatgacggagcccttgaggatgagcgaaccagacgtgacgaggacggggatgaacttgctgcaaagtcgagcgagcaaagacgtcaacaccgacagcaagtacgaacgaggtcacggcagtacgcgagaggactgactgccagacgatgccatcgggcttcgaggcgtcgtggccgaagaagctgacgccgccgtcagatccggcgccgaccttgaagccggtcacctcggccggccgggtcaggtcgactgcgatctggacctcattgttgaggttggccgagatcgagtacttctcttcggtcgtcgtcgagcccgtgtgcttgattgtctgcgggcgggtgtgaggagggagcgtcagcatgctggtattcgcgcgcggcgcagagagaccggacgtacgacctggtccgacgtgatcgacttgccctcagccttgaacttggtcagggcgaccgacttccagatgacgtccttcgtcttggggtcgtagcgcttgaagacaaagttgatcgaggcgggcatgagcatgatgctgtagaggcaggtgaccggccgtgagtcagctcgacggtacccgctcaaaggatgccagaccagcgagcagcgagtgacgtacccggtgaccgagaagatgacctggaacatgacccagctgccgtcggcgaggatcgcgtaccacgactgggtctcggtccggaagcccttggacgtctcgaccttccagtcggtgtcggtcggggcgagcgcgccaaagagctcgcccgacgtcggcagtggcttgaagttggggccggtctggctgagaagtcaacgaaggagaccacaggtcagtttctgagctgacccatgcgagctaccaggtcgaggaaggcgcaagcgaggcgatgggctgaaggtcggtcggtcgagggaaggccggcgagaggtcgaccttaagctcggccggctcctccttccgacgcaagacagagacgacacccgtggaagcctgctcctactaacatctcgtctggaccgaccaggctctgactcctacatcgacaggcgatgaagaattgtcgtgcctgcctggacgattgcccgtcgtaagctcgctccgaagcagcaccttggccagcgacgcacgcgcgggcgtcgtcgtcgctgggacccactgcctcgaccctcagcgcgacgcctagaaagaggaaggactcacgcaggggcaacagagaaccaggacatcgtgattgagtggcgttggggtttgagattcgggggggaaggggagtggtggaagtcggcagggagggcaagcgagcttctccgcccggccgccggctcgcgtcgcggccgcgcaccagaagcgccgtgacgtgcgtcctgctgttgcccctgtccacggccggacccgatgctttcctcgaccacaggtcctccaaagtggagatgcatagatcgagatgtcgtgagttgcatttcagatttgtgctggaatcggcggcggtgacatgacgagacgactgccggccgctgacggcctgtcgccgccggccactcggggcgaatcgcagccgtcgctcttccagtggcccgagagcgacaatgcccctcaaaatttctgtagaccagatctggcggagggtgtgtgtcgttcagacggtcgatcggccggctgggcggctcgtggtccttgcgcccgcgccgacatatcgcggcaaagtcgtcttcagtcgacgagcgggggttgttcgtggaggctggcactggcagcgcgtaggtcgagccttggatggtgactgggcaagtctgatgagcgcaacggaggggtagcaacggtcagatccgtgaagtcgcctcgcgcacgggtaaggcctcacgcacatgtcgtcctccttcacaccaatttcagaggaagctgcccttctcgtcggcccagccgtctcgactgcgaacctcccactcacggatgcccccttccgttcccgcccagacccagccgccgcacgggctgaagccgcagcccgtcgtgccgatgctcatcttctgctcgccgatcgccgcgccgttctggccgccaaagggcgcggtcggcgagtgctcggcgcgttggctgagcgggacggtcgagagcgggaggtcgagcacgtccttttctgcgtcagaaggtgaatggcccgagcagaggtagagcgaggtgaactcgtcggtgaaggcgaggagctcttctttgccctgattccccggcggtgagaacttgacgacacgcgcggcgttggagaagcggccggtcgcattgccggtcgagaggaatgagtattgcgacgcgagcaggttggcgcctcgggtcagtgtcgggtccgagatctcgtggtggaacgaagccgggagcgggttggttgagagtgtcgccagcttgaccgacgagcggtggtcccagaccgagacgagaccgtctaacgaagaatatgaggagttcagcacttagcagtgtcgcgggcggctctttgctgcacaccttgcgaagcgacggcgaagcgtcggccgtctccgctccaggcagtcgagaaccctgcgtcttgcgacgcagtgtacacagcgatcggtcgaaacgcttcgccagagttagagacttgatgctgtcgggccaaagcagaagttagatgggggtcggcgtccgagtcgtgagccgtcaacgaaccaggtatactttggcgctgtcgccgaccgagaggagcgtccggccgtcgggcgagatggaggctggagcagaggagaggcaatgctgttagtcgaagcttcaaagagagggaatgccgcggctctaacgtgctatggttgaccgagacggggatctccgcttcgccgacctggttgagttgcttcttgcgggtgaccctaagctcgccctcggccctcggcgtccccggtcgctcgacgcccatcaccttcacgcttccgtcattgttgctgacgccgacgcggatgccttcgcttccaccccagggcggtcgggctttgcctgtcgcagggacgagcggcggcgcgagatgcgacgagtgcgagacgaacagcgagttgttgatggacgctgggtaaggcagccgggtgtggatcgctggtgccgtcaggtgcgatgcccgacgaagtggcaggagcgagagctcagatttgggaccggcgactgcaatgtgctcgaagcttgcggaggaggacgacgcgatgtcgcgtcagggacccggctcgaagctcgatcagctgccaggcacgcgagctcggacgcacccaaagctgatgcagttgggcacatagtcgaacttcgtgtgctcataggtctggcagagcttggactgaggtcagcagcaagctggagctcctcaccgagcttgcgagggagcgaccaaagggactgacatacgacgacccgtcgttgtccgagttcgcccggcagagcgctttgccgccgacgtagtagaactcgccgcgcttctcagggcagacgatcaggtccttgagctgccttggagcgggacgtatagctcaagatcagtcatcatgagcacggccgacacgaggaaggcacagaagaagggaccgactggtgcgagatgcagatcgagacaccgaagtcgcgcggcaggccgggctcaacaaagcgatggccgctcggagtacccgctggagagaccatagaaggtcgggcccggggctgatctggccattcgtccttgctcaggaggtgatgggttgcgctgtagtaggtcatcgtcggctgcactctcttggctcgggctgaaacgcccctttcgacgccctgccgcgggcctgttgggcaagccggccgacctgaccgctcttcccgcccgacaccgacctccctactcctcttggctttgcagatcgccctggaggcctctcagagccttcttccgacaacagcaggctggcctgttgctcttcccttcctactctcaatagctggcctcgacactcgaatcaactcagcgcagatcgctcgacgcatctgtcgcctcctctctcgcttcagcccggcagcagcagttcttactactccagcctctcaacatgggcaagctcctctactctgacgtcgcccgtctcatggcgctcacgtccggcacctgtccctcctcctcgttcagccgtcggtacgctgttcttcgcctgtcggctgacggttcacgcgtcctgctgcccgctcgacaggggccgtctgggccggcatatgggccgtcgcttaccgcaagttcttctgggacatgattgtgcgtcgcaatggcctgtgagcctcatcaggacagccaagagctgaatggagccggctgccgatcctcgacagggtgccgagcttggaccagctggcctgatgtgcgacctgccctcctgcccctacctctcacacagcctcgctgaccgttcgcttctgaagcccgaccgcccaggctaggcctttcctcgccatcatcgtctcggtgccggtcgtccaggcgttcgtcatcgtctttggcctcgcgactcttgtcctcgactggggcttcccgttcgtgcgtgcctcctgctcgtcgcctgcgtttgaggcgctaaacacgccagctcactcctggacgacgtgccgacctcgcagatgacggcgaccagcctaagccggagcatcgtcctgcgaattatcctttacgtcctgtttgccgcgctcgagatcctgctttaccaggtgcgcctaatgtctgtttgctgacttgcagcctcttgtcgagctgacgtgctctcgtgagtcctgtcaaagggcttcgacggcgccgtctactatctcatcacggcaggcgtctacacgaccgctctcttcaaaggcgagactctcggcgctgctgcccaggcgggcgacctcgccggcgagggaggcatacggccaggaaaggctgctgtctaagccacttgctcagtcccctcccttgtacgttcaggccgactctgtgctgagccgccttgcctgtagcttactccttgcctgtagcttactgagagatcttgacgtgggcatgcattcagacgtgatacctctgcctcgaggctggtcctcctcatgccatcgttttgaagactcgttttccccactgtgctctctccacgttcccactgtagccctccgactgcctgcttctgcgatgcctctttcatttgtcaagatcccagaccgtcacccgcaggcacgacgtttccgtgcctgccagtgccctcacgcgtcgacgcgcgcgccttctttccgaacgaccacgaccgcccgctcgtccgacatcgacgacttcccttcactcacaagggcagtcctacagtcatgtctagccagaagcggcagatgacaaagtcaatccgggcaggtctcaacgtgcgttcctcgccatcctcttgcgctccgagctcgacttattggcgttgtgcccggagtccccggcctcccaagatggatcctgcgagagcggagcacgcgctgcgctctgcgagatgctgctcagcaactcggcatcttgcccgctggcaggttaggagggcaggcgtcctgtcgcggatggcagccgagtcaacggctggcggagggcgagacaggaggtcgagcactggccgccggggtcgaccgacgcgctccgccccccgacttcctcctcctgccatcagctgggctcgccgaggtcgctcctgctcagacaaatcttcgtacatggggctgactcgccgctcgccctgccttgactgtctgcagctcccggtcggccgtccgtcccgtcgcgcgatcctcctccgcctgcccaaccagctcctgacgcccaaccgttcgcttccggccgccgcctttcttgcttcatcctcatgacaggttgtcaccgtctgctcaagaagtttgcccatacgaaacagcgcgttgcgaccgacgccgccgtctacatgacctgtcagtcctcctctcctctgcttcagctggtccgcagcgctcgagctctgtcgaccgctgcgcgcgaggctgacaaccggctttctcaacctcctttctcagccgtcctcgagtacctcgtcggtgagtttcgggcagccgatcagaatccgttctcttggctcgtgctgatggcaccgttgctccctcctgcagccgaggtcctcgagctcgccggcaacgcatgccgcgatctcaagaagaagcggatcacgccgcggtgcgtccgttctcctcgacgaataaaagaggcttgattgctgacgctcaagtgcgctgcatgcgattcgacaggcacctgcagctcgcgatccgcggcgacgaggagctcgatttgttcattaaggcgaccatcacccagggcggcgtcacgccttacatccacaaggtatgtctttgctcgccctttgcattgacttggaccgcttctgatctatgcacttcgactgttcccctccaggacctcatcccgagcaaatcgatcctcggctggtcgaagaaacgccaggaatgggagcacgcccgaatgcaaaacaagaaccggccaaaagagcattggaaggtgtagctttggctcggcgtccttcctcctgtgcgccgaccgctctatcttggggcggggctgctctcggggctgcgcccttgacctggtcggcaacgatgctccgctgcgtttcccgccttggccaggcactcgcacgtcccccaattccctcgcctttgcggccttgacgtcgcatcggcccgtatcctgctcctgcccgtctctagctcatgtcttaacgtcctccccttttctctctaccggccgatttatgtgtccttcctctgtgaagtcgcttcggactgccgactcttgcagttggccgctcgcccagcgctcgctggcgcatcattgaaactggccgcccggctgccaaggtaagctcctgcaaacgacgcgcgacaaggcctcccaactccgcttgcgaacttctttcgacatcctcttttgccgtcggacggcggctcgcaaaggcgttgcgatcactgggcttggtgagcgtgcgctatcagccgttcctgtcgcccgcgagcagcgcggaaggcgcttcgaagtcgaaggcgaccgtgtgcagtgcggacagtgaggaatccggcagcacggagcgccgcaggcactggcagttcaacaagaggtcgacatggcggcagccgacgtgctccaacgctcctctgtgcagcactctgaacgtatgggagcagtacttgaccagggccgctggcaggaaagggagctgagcggcaaaaagggcgcgatgcaggatttgaacccacgacctcctctatttccagtcctaaccgggggtgtgacccgaaagaggtatgataccactacaccaaccacgccacaatgataacgtcatcattagaacacattataatcaatctgtaaaggttgcactgctctgtcacgatcttctcagcttgtttcggctagcccagagcgcccttctcagatcatagcgatgaccttacgaccagatgaggacgctgatacacgggggcatgagctgctgcccttcgagaagcatctcgaccagccggcggcggcggcggcccgacgcgacgagatggcccgatcgccgccgccgctgcgccctcgtgtccgacgaccatctcatcgaaaccccatcagtttctttcttcccacaatccaggaggcataatatcccacgatcatgtcctacggcggctcctacggcgctagcggcggtggcggcggcggatgtcaggccctccgaccatcttgactcacgaccgacccgcagcgaggctgatgagctggaccctccctctgaccccccttgcttacagacggatacgagtctcgctctaccggcggcggctacggcgctcctcccgcctcgggaggctacggctcatcaggaggctacggcgccagccgcgacggctatggctctggcggtggcggcggaggaggctacggcgtctcgcctggcggctgtgagtcgcttgagcccccttgtcggcttgcctcgagatctgccgagcgatcgttgctgactgcgtcgtcttgcttctcttgctctagacggacgcggaggaggctcctgtacggtcgcgcgctcttcgggtagctcgtatgctcatgctgacccgacatctccgctcgctcggcagatggcggaggtgctccgagctacggaggcggcggcggaggctaccgcagcagtggaccccctgcttacggcggcggcggcggcggcggatatggcggcggcggaggaggctacggcggaggtagtggcttcggaggtgcgtctggtccctactccttcgacgcgaccacccggccggcgctgacctgaccatgcagcgtccgcaggcgaccggatgggcgagctcggctccggcctcaagcccgccaactatggtacgctgcctcatgtcgacaaaaacttctacaccgagcacccgaacgtcgagcggcggtccgaggaggagaacgagcgcttccgcaaggacaacagcatcgtcgtgcgtcctgctgcatctccgaagccgcttttcctcgacgctgatgcctacccctctcatctcctgcccatccactccaggtcaccggccgcggtactgtcaagcccatcctgacgtttgaagaggccggcttcccgccatacataatgagcgagctcacctcgcagggcttcgacaagccgacgccaatccagtgtcaggcctggccgtacgcgctgagcggccgcgacatggtctcggtcgccgagaccggctccggcaagacgatcgcctttgcgctgcctgccatgtgagtcgcttcgtcgcgtctctctacgcggcctctcgctgacccctcgcccccaattccattaacaactctagggtccacatcaacgcccagccgctgctcgccccgggcgacggtcctatttgcctgatcctcgcgccgacgcgcgagctcgccgtccagatccagagcgagtgcaccaaattcggcaagtcgagccgcatccgcaacacggccatctacggcggcgcgcccaagggcggccagatccgcgacctcgagcgcggcgccgagattgtcgtcgcgacgcccggccgactgatcgacatgctcgagggcggcaagatctcgctcaggcgcgtcacctatctcgtcatggacgaggccgtgcgtctcttctgcccactgcgccctgtttctgacccgtcctgaccaccttcccccctttccgtctcaaggaccgcatgctcgacatgggcttcgagcctcagatccgcaaggtcgtcgcccagatccggcccgaccggcagacactcctcttctcggccacctggcccaaggaggttcagcgcctcgcggccgacttcctcaacggtgcgtcccgaacaagaatcgtcgtcggtctcctgttgctgacctcaggaacatcttcctggctcgcagacaacatccagatcaagatcggcgccgacgagttgtcggccaaccacaacgtcaagcagatcgtcaccgtctgcgacagctacgacaagcgccggctcctcatcaaacagctcgaggagatcgcccagacgaacggcaaggtcatcatctttgtcgcgaccaagcggaccgccgacgagttgacgcgcttcctccggcaggagtgcgtctacgagctgcgcctcatcccccctcgtcactcgctgacaagcttcgctcgtccgcgcctgcagcggctggccggccctcgccattcatggcgacaaggagcagcgcgagcgtgactgggtcctccaggttagttgagcgcggcgcctgtcagcagctcgacatcttcacgagtcagacggctgatcacgctaccatcccggctgcgtcctccaggagtttaaatccagccggtcgccgatcatgattgcgaccgacgtgagtccgctctgctccgtctcggctctgccttgacctgacttgcttctctttgcatctaaggtcgcctctcgcggcctcggtacgtgcactcgcaggccgctaccccggccagagcgggcggcaatgagtgacgcgagttcagaagtctctcgacggcgcccctctggctgctcgtcgctgtcaggcagcagcgcgaccccaagtcgctctcggcccgcccagggccatcgagcgaaggggacaacctgccgctcagcgcgggcatcgcaagagacgcctccgagacctctgacaggacgcgtcctccagctgctcgagggctcactgacctcacctccctctagcttgcttgcacgctaatagctgaccatctcgccctcgccacttgccatctgtcgtcgcatccggctcgtctgctcaccgcttacgtctcggctctgcatcctcttgaatcctcttcctcttggtcagagtacgtcgatccagccatctgttctgccttgccagcgctgaccgtctccttctcatctccaacagcgtcaaggacattggctttgtcgtcaactacgacttcccgaacaactgtgaggactacatccaccgcatcggccggacgggccgcgccggctccaagggcacgtcgtacacctacttcacgaccgataacagcaagaatggtgcgtccagcctgtctttccgcgtgctgagtcccgtcgctaacctgtccatccgtttgcttgacctagcccgggagctgatcgggattttgcgtgaatcggggtcggaggtcccgcccgacctcgagaacatgtcgtcgtacggcggaggcggaggaggcggtggccgcggcggaggacgtcgtggcggcggcggatgtgcgtcatttctcggtctcttcctaacctgcgagactgctgactgaccgcgtaccctctcttgaccgttcttagacggaggcggcggcggaggagggggatgtacgtcctgctcattctcaacctgtcgcgacgaggcgctgacttaaatctctctgcctttctttaaggggggggcggcggcggaggaggcttcgctcgctactaagttggtagcccgttctcgcgacttaaacagattgtatgcccttgcctctggttctcagctactgtactcgttgcttctagggcttgtcccaagcaagggagtgttgggtgtgcttcgctccccggcaacgaggctgggaaggcttgaactcgcgcgcggcaagtcagaaagcaaggaccgacgaaggccgcatgcatgtctgacctttggataggcctacaatcacccgtcccagccgtgctacagggttgcagaagagaagaaaagtgcaaagctgccttgcttgggaacaggtagcaatgtgaagcgacctgaactgccgcagaggtccgctcatgatagatatcggagaacttaacggctcatcactttctcatcctttggagaaagtctcaaggaggtgacagcagggcgggcagagctgggtgcgttcaggtctgcaggaaacggagcggcggccgtgcggacttgttttaagattagtcatatttgtttgactggctttgtgaacaagcaacgttgctgaccaaacggttaacacatcctctcatcttctggagaggccggttcgattccggcatcgacctatgaaacggttgattagtatatcggccagtacgccagattctgacgcgcgttaacttttgcctcggcttcctgagttcttgcgttggccgaaccggttactcgtctcaagacattcttgcgcacgccaaatcgcatcgacaagccatcatgtggcccttggcgaactggcaatcattgagagttattgtatagtgtgcgagttgtcagggggtgcttcatgcgtttgcgaccctttcgcgatcgtacggcgagttactagacaaattgtttccttcgcaacgtgtacccctccctcacgacgcatgctcactctgcgcccattaagtcgttcctcttactcgcgctcgttcggcgatacatgacgtggtcggtcgaagacagatcgcacgccgtggcccgaaagtagactctcgtcagccgactgcaattgagcggcacgcctgctcttcgtaggtgcgtgcgctcaacctgcccctcaaccgaccgtcgcccggacctccggacgacccgcaccttcatgcgcgacctcagccataacgacgccatctagtagaaaagagaggcatgtgatcgaagaagtgaagtgagggggccactctgctccctcccgccgtactgacctccgccacctgcccggccgcctctctccctccgcagcacacccaccaccaccaccacccaacagcccatcgcaccctccccggccatgtgttcgagcgccgactgctcgcacaaggccccgtcagcggccagctcgcaagaacagacgctctcgcgcatcctcgaggccatgcagctcctgaccgagagcaaccaggccctcaaggcgcaggtcggttgtctcccgctatctcgatcggacgaagcgagagggtcatggggccctgctctgtcgtctcggctgctaacaacccatcctccctcatgcctatcaggtcgacgagctttcctccaagcaggtgggcaacatcgccgatcgtgagtcccgccgagcagctcatccctcccgtcgtcagctgtcctgcagcgccgcccgcgcagcatccgcccgtcagcccatctcgccctcatcatcttgacgcacgttaccttccattccagcccgcatcacctcgccctcagtcctcctgccgacctcgacgcctccgccaggcctccacggccccggtattggcacgccatcctcgctcgtcctcggctcgccgcgagtttcgggcatctcgaccccgctgagcccgacgacggccatcgtcggaggcaagccgcccgccaaaaagggccagccgacggtggagtcgctctacccccagcgggttatcctgacgagtgcgtcgacgcgcgcgtacttcctctacgtcgctccttgactgacctcgactctatccgcctgcgcacagcctacccgggccaggttggcgtccacccggtcccgcttacctggggtgcgtccgacgtccaggctcgcggccccgtcgtcgcctcgcgccacacttcctcgctcaagatccgcaacgcgatcgggtgcgtcctctcttgcgacgctcttgcctgcttcgaggctgacagtcagcccttgcgttcttcagcgcctactctggctcgtacagcatctacaaagcgctcgcaatcgcgctcgacacgctcgacccgaaccacaaaccgaattatgagaatacccatccgcccttctcgctcccgccccagccggcctggttcgaccgcaagcggatcgtctctctcgacccctggggccacatggtccagactgagtttaaagcgcaaattgacggtgggctcgatgcccggccgactatctcttgcacgcgcgcgcacatcaagatgtctgaactcgacgctgcaagcgcgagcggctctctcccggtcgacgggaagattgtccagcgcagtccggcatcgacgacatttccggacgtcgatcaaggcgtcgaactcaacgtcagcaaggcggcggtcgagcccgtttggcacctgccgggcatggccgagcgcttcggcatcagcgaagacctgctccggcgttcactcttcgagggtccgtcgcacccttgccgccgcagcaccacttgcagcgtcttctgctgagctgatccttttggacctggcctgtgtgtttacagagaccggcggcatgtaccccgagctcctcacccggcgcgacctcgaggtcttcctcccgcccatcggagggtgcgtctccccttctctccatccgttcgcgtccttctgctgactgaccgatcctctccgcacgctcatccgccggcctccagtcttacggtctacatctttggcaacccggccttcatcagcgatcagagcaaggagctcacgcttcgcgtccacgacgagtgcaacggctccgacgtcttgttcgtttgaattcctcctcccatccctctttgatcccccagcgaccgtcggctgacgcccgcccgtctttgtcgtctcgttaaaagtggctccgacatctgcacgtgccgtccctatctaatttacggcattgaggaggccgccaagtgtgctcagcggggcggcgtcggcgtcatcgtctactttcgcaaggagggacgcgcgctcggcgaggtcacaaagtgtcggtcttctctctttgtctcccccgcctacatgcccgtcgtcactgacttctatcgaccgcacccgtgcccgtccgttcgcccgcgcgtcgcagacctcgtctacaactcgcgcaagcgcggcggcgactcggccgaccgctacttcaagtcgaccgagctcatcgccggcgtcaaggacatgcgcttccaggctctcatgcccgacgtcctccactggctcggcatcaagaagattgacaacatgatctcgatggtgcggccggctttgactgcgggcggtgagttggcggacctgcgcaatcaaggctaacctagacctctcttcctccgtcccggcagagcgacatgaagtatgacgccatcgtcgagtcgggcatcccgatcctcaagcgctacgatatcccggctcacctcgtcccgtcagtcgcccgttttttgtagttttgttttgaccttgccgcgacctcacggctgacgcccccatcccgctcctcctccccaggcccgactcgcaggtcgagattgatgcaaagatcggggcgggctacttcggtggcgacagggttgtcaagccagaggacctgcacaagacggtcggccggatgtgggaggagctcgagcactgagcgccattcgttcgacctctccctctctcgtcctttccccggttgtactcgccagcgcggccgtccgatggctgctccgtctctcctacttcatccctttgtaacgcctggctctacgatgccttccttcctcctggccttgcgaggcctgtgacagagcaagcaggctggcagctcgactgctgcgggcggacgagagttgatttgccgatgcaagttggcccgccgcgctgcgggttgttccgcctcaccgccatcacgaacgacggatgctctctcgcaccgtgctcgccctcagcaacctcatctgtcagtccaaggaagacgctgtcgagctgtctgaggaggtcccctgacgccaatgctctgatctgccgctttttgtagcctcagcgcacacctttcgcgcccagtcctcgaccgaccgaccacccttcctttcgcccgcccgccgcagatcacgatgaagggcatgatcaaggccgtccagcggacgccgcatcacctcacctcgagggtgggcatggccaagagtgcgtcgcaccttggcctctcgctctctacctgcatgtctgacgctgacctcttgactcgacggcagagagctccgacctcgaattcgtcagtcttcatctcccgccggccggccgccgctcttggcgcttcgcagctcagcttcccggccaatgtcgctgacgctcgccgcctcctccttgccaggacgacatggagcgcaagtttaagtcgatcgagcaggcgaccgagaagctcttcaaggactcgaaggtgttccgcgatgccgtcctctgtgcgtcccctgcccgcgcgctgcacgacgccgccgccagcgggtcctcgctcgctcagctctcgcctcgatcatacgctgacgcccgcgccggccgccttccttgtccagccctgctcatgtcgggcgagtcgttcggcaactctttctcgtccctcttctcgccgctcggggccgagtacgacttgatcagcaagaacccgcaggccgaggcgacgatcaagaactgcggccagtatgccatgctaatgaatgagctcaggacggccctctcgcccgagctcgagctcattgacagccgcgtcattggcccgtgcaaggacctccaagacgttctcaagaaaatccgcaagacgatcaccaagcgggaccacaaggttggtctcccttccgcagccctgcttggccgtcccatcgctcaggtgctgatcatcctgctttccgccagctcgttgactacgaccggcacaacaattcgctcaacaagctccgagacaagaaggagaagtcgctctcggacgagaagaacctgttcaaggtcgagcaggaccacgaggcagcgacggccgagtacgaacactacaacggcatgctcaaggaggagctccccgtcttcctcgtcatgggcaccagattcatcgacccgctcttccactcattctactttatgcagctcaacattttctacatgtgcggcggcttccctcgtactacgcgcgctctgcaggcgatggctgactcccattctgctgcacaggatgtccgagaagctccaatcgttcactgatggccgctacgacctttcgcggaccgacatggacatcatctacgacgagcagatcggcgacgttgcgacgacgctcgaggcgctccccgtcgttcagcgccaggtgtcgacggccaagctcatgtcggccgccggtcacaccggcctcggccggtcaggctcgaccgccggatcctcgattggccggacgccgtcgacctcgtcgtacggatccaaggcgccgctcggccgtcagccctcgacctcgtcggttggaaagactatgccgccgcctgtgcgcggtacaggtggcgccgctgccccgccggcctacacgccccctccagccggctctgacgtcggcgcgaacccagccggctcgaagcgcgcgccgccgccgccgccgccgctcaagcccaagccgtcgtacggcgcgcctgcggtcaagtatgtcgttgcactgtttgactttgaggcccaggcggcaggcgatctgagcttctcgaccggcgaccggatcgagctcgttgagcggactggcagcgccgaggactggtggaccggtcgcgtcgacggcaggcagggtgtcttcccaggtacgtctccgcggccccttcctttgctccggctctctcagacagccagctgacgacagtccctcctctcctcccaggcaactacgtccaggaagagtagacgccgagccgacttcctctatccgctcctcactgtctcaacttatctcttcaccttctcccttccccccccccttgtattcgaaacgccgcccgcaccaaacatctcccggccgatgacgatgagcatgggcccacgcgacccgaccccttcgcgctctcgtccctggctgtcctccgttcaacgtctcccgtcttgcaaaggtcgaccgggcccgacgtccttggcagtcttgcaagacgcacgacgctagcgcaggctaccgcgcttcgtatggaggtgagctgctgaggtcggcgaggtcggtgggcgccgggcccagcggagtttcaaactgccttgtgctgctgcgcgcccggcgcgcgggccaaaagcggacgaagcgcctccgcctggtcgcctctagctcgatctctcctctccgacaacgggtggtgtcggtcccacgagcagcagactgctaaccccgactgcttctgagtccgtccagagcagcgtcgaagctgacctcctcctccgttgaagaaaacgacgacgtccgtcgaagagctgactccggcaagctcgtccgaccagagatgcagcagagagaagaagcccttcaagagcctcggctctgaccgaccgctctcggacgctcaccatctccacccctccctcaagccagcagcatcatgctctcgacaaccctcctctctgggctcgcgcttctcggcgcgacggcccaggcctctcccctctcgcggcgcgagaacgatgtgctgctcaagattccaaagggcgacggcaacgtacgcagcagacggcgctttccttctcaatgtgtcctccgtctgaccttcccactctccaccggtctgcaggccacgtcgtcgaccctctacggcttcatgtttgaggacatcaacaactctggtacggtctctcactctgcgtcgcgagtgacgtagctctgacgcaaccgatcgcttcaggcgacggaggactgtacgccgagctcctcagcaaccgcgctctccagatcgtcgacgtcgccaaccagtcgacggccctgtacacctggtcggctgtcaacggctcggccttctcggccgtcaacgacaccgcgcccgtttcggccgcgctgcccaactcgttcaagctcgacctgaccaacggccagggctctttcgaaaacgagggctactggggcgagtctcgcagatcgatcagactatctacgaagtgctgaccgctagatttccgtttgcaggcatcaaggttgacagcgagtggtcgtacaacgttagcttctgggccaagtgcgagtcgccggccgacgtcaccatctccctcgtctccaattcgaccggctcgctcgccgaggcctctttcccggccatcacatccgagtggaccgagtacacgacgacaattaagcccgccaagtcagcgtccgacgtcaacaacacgttccgcgtcgcggtcaacggggccgccggcagctcaatctactttgccctcttcagcctgatgccgccgacctacaagaaccggccgaacggcatgcggatcgacattgccgaggccatcgctgctgtcgagccttcgatctggcggtacgtccgggcctgcgacgtcgtctgagaggccagcatgctgactaaatctccttcgatccctcttttagcttccccggcggcagtgagtcttatcaaggcagcttgacctgtcagactgagctgacctcatcatacctctcgcgccacgctagataacctcgagggccagacgcccgacacccgatggcggtggaacgagacgatcggccctctctcgcagcggcccggtcgcatgggcgattggacgtaccaaaacacggacggtctcggcctgctcgagtacctgcactggctcgaggacctcgacgtcgagggcatcatgggcgtttacggtggctatagcttgcggcaaatcagcgtcaacgaggaggactttgactgggtcatccaggaggcgctcgaccagatcgactttgtcctcggcgacgccgccacgagcccgatggccaagctccgcgccgacatgggccaccccgagccctttacgcgtgtcaagtacatcgagatcggaaacgaggacttgtgcgtgtctcccttttcttcctctgcatgtgctctgcgctgacacggcccttctctacttcttgctgactggcagcttcgctgaggagaggttcgtctcttgggccccgttcctccgaccactttgcagcggctgagcaccgttttcttgtctccccttcgacagctaccaggcctaccgctggcctctgctccagaaggccatctcggacaagtacccggacctgcctctcatggcaacgacccggcccttcaccgacctcgtgcccaaggtccgtcagaccggacgcacttgcgtagcgtgacagcgactgacaccgctctcctcctgctcatacgaaacaggagcagtacagcgaccggcacgtctaccagacaccaaagtggttccaccagcaggccaaccggtacgacaacgcgccccggccgccctttggcccgatgatcttcgagggcgagtacgcggccatcagcatgaacgccagcgacctctacgcgcctgtctccaagaacgttgggcgcctcgagtatagtactcagatgagcgcttgcggcgaggcaagctacgcgatcggtttcgagcggtgagttcttgctcctcgttgcccatactcgtttattcgaagcctgaagctgacgttccgctcaaccgcctccagcaacgccgacctcgtcttcgcctctgcttacgctccaatgctgcagaacgccaaccgcgcccagtggtgcgtcgcctctcgcactcggtcacgcaacgtccgagactaacactcgaccacccctgcaggacgcccaacatgattgtctttgacgccggggaggtctacccgtcgatctcctactatgtccagagtacgtcgccctctgttcgatcgttcctccatctcgtcctgacccctccctcctttgttctcctcgcagagatgttctcgacccaccgctccgagatcatcctcccgaccaccatccagaacggctccacgccctacgccctcaactgggtcgccggcgtcaactacgagcgctcgctgctctttgtcaaggcctccaactttggcgaggagacgatcccgctcgcgctcgagttcggcgccgactggaacacgaagaacgcgacggttgagatcctcaagtcggacaatgcgaccgcgtggaacaagcccaacattgagaacagggtcgagcccgagctgacgccggtcgagctctacaacggcaagctcaactacgacatggttcgtctcgttccagctcgtccgggtgacctcgacactctgctgaccgtccccaactgcacccgccccctccagcccccttactcggtcgccgtcttctcggtggccttctgatcgtctggacgacactgtacatattcagactcttccaaaaccttgtatctatcaatatgctgctgccattgtctcatcaaacccgttcgtcttgccgggggcgaatctttaggacagaggctgcgcttgacgacggcgcctgtcgcgcgggcggtcctctccttaaatcctcaccgtcatctcgtccttcgcccttcttcgacccggcgctctagcaccatgccatctccgctcgcactcgcagaggttcccgacggtcactacgtgctcgacctgaccccaagccggtcgttccacagcgtcctcacgcttcggctccccccgtcgccgtcgccgccgccgcctccggcaaccagctgctcgctccaggcgctctttgctttcgccccggagctcatcctcgacccttatcagctgccgtcggatgtgaggattcagtactacgggcaaggcgagctcgagctgcctgcagtcaaggccgaccggctcgggacgggcttgttggcccagctcgacagcctcgctgctgccggcaagagggagctcgccgtcaagctcgacgggcggtacctcctgtctgcggaggagggcgaggccgacagtagaagcgtcgagattggcctgccttgggtcggatgggtgtgcgacgccgccgctgcctccgccgccggctcaggagcggtcggcgcgagctgtacgttcccggccggtcgtcgtcgctctgctcgtcgaaggcctcatgtcagccgctgacccctctcgctcctcctcctcgctcgcagacgtcccgccctcgcccttcccttcagatctgctttccaacacgactctcttccccctcaagccgctcgaaggacaaccgccgctcgtcctgacgcttccggttgggcgcgcgtccgacctgccgctcgtcgagctcacgacggccctcgccatctggatttgcgccggctgggtcgcttggtcggcctggaaggctctcggatccgacgtcacggccgaggagaagcgctagaacagctagatagcctggcgatcccctgccgctcattgggctcacgacggcccctcgccatctgagcctgtgcgccggctaggccggcctggaacgcgtctggcatcgagcgagccgccaggttcagaagagcaagaacgagccagatatcccataaccctccttcccagtcgggcgcctccgactgagaggagcaagtgcgagcttgcgacgacgccccctcgccgtttgggcatgtgtgccgtctatggtcgcttggtcggtctggagcgcggttgtgaggggtcaagctctcggcggccgaacgggctagccgtctggcgaggtctctgcggcggctcaagcaggggagaaggagagagtgacggcgggggccagtcggctgcttcgtcgccggcctcgtctcgtctcggtaggccgaccgctcggcatgctctcgccgggcactcggctggcacccctcactcgagagatccctcacgtcccgccggaaccgctttgtcaatcttctcaaacatggtgcgtgtgcggcaggcgagacccgtctcaggcgagctcgtgaggcggccccgactgacgccgctcgggtcgtcctgcttacacatgtccctcacagctagctggctcaggtggcagcctctcgcgtcatcatcagctctcgctccgtcgatcttcgtgtacgtcctgcttgatgaagcttggccgctcgacggacgggttccctgatgacttctccttcgcccgttctgcgcagcccacgcccgttcgagccagcccgctaactatgccctggtcgtcgctcccagtcaagatccaagacttgttcctcggccacgtcatgtacgagcccatcaacgcctggcgagacgaggacaaccgtccgggcctctggctctctcgtcaagtccatcaatttacctaacggtgggccgtggtcgcagtggctcctctctaccgtcctctgcgagaggctgccttccctccggcgactcgatgcctcgggtctttggtggtcgtcgatcagcaggaagggggccgacagggcgaagcagcagcaggcgggcgcagcagcccagcgaccttcgccccgacgcgtcgaacctctcttcccttagctagccggtcttcatatgatccgatgaccgccccgctgaggtcgcgtcgtcgagagctatcgagcggtaccggtctcgctgctggaggatgcgtcgacagccatggccgatccctttcggacctgctcagagaacaaagagtagaggcagattgatgaacgcttcgccagccttcacccttcgtggccctgctggtctctttcctaaccttaagcggttgtcgagggagtttcttgcaggcgagctgttgctgcatgccatcgctcttgtcctgcaacgaaagcgattggatcgtgcgattcggccgccgtcgctcctgtgcagaaaactccaccctgtccagccccctcgcttctccatgagaaaggaggcaggcacagtggtcggcttccaaaggagtggcgttcgacctggggcgaacgactttgcccactagccagccggacaaaagcgaggccgtcgatcgccctcgcccttttgttcgcccaactcggacgctccctgctccctttgttttcctctctctccgacgtcgacaacgggcgccctccatcgaggcccccggctcattcaagaagccggaggagccagcaggctgatcggacccaagcttctcttgaagaagaaagaaagaaagaaagaaagaaagaaagaaagagaggaacggccggccctctcctgctaatctcgacctaccctccctcacccacccttccttcagcccagcgtccgctggctccttcgctctcgacgatggctccttcagcaacgtccatcgcctcggcgacctttgctcccctcggccgccgacaggaggcgtgtgccctctcgtgcctgacggcgacggacgccgacgcgtgcgcgccgcttgacccggcctgcctgtgcgcctcgagcgcctggggcgagctcatcctcgtgcgcccctccggttcagggccgtgtctaccggcagaccagtgactgactcctcacttcgctctccagagctgcctccaagcctcgtgcgaaaccgaagtctcgctcgacacggcctactcgcagctgcagctttactgcgacagtgccgtacgtcctcagcccgtcttaccttgcgacgctctgccagctagttgacgtccgctacttccaccagagcacgccctttacgctcgccgagccggtctacaccggcacgatgacggcgagcggcgttgctgcgctcacgtctaccgtttcggtcgacggcagcgtcgccgacaacggctccacctcgaagcccgtcaatgtctcggccatcgtgcgttgccctccccatcagtcgctcaccccaggtcgccagagacaatcgacgctgactctcctcgtcccgcaccgcagatggccagcatctgttcgctcctctttgtcattgccctcctcgtcggctatcacggcgtcaaggagaagctggcccggcagcgcgagcagtcgacgatgaagccctcgtcctggaccggaggttggtcgtcttccgtcactttctgccagcgcgcaggtcaactgaccttctatctccctccaatccaggcaagcaggccgctcccggtcaggagctctcatttggcgcgcccggcggcagcggatcggccggcccgtcatccaaggcccagccgacaaacgtctcggtcggcgctcactcaagcctttttagcggcgcgtccagtgcgttcgacagcgctggctatgccgaccctgagatggaggaccggcagcagcagggtgcgtccggctcagcgctctacgctctacttgagactgccctctaaagcctctcctattttgattgcagcccgtcgtgcgcggctcgaggccgaggcccagcggcgcaagaacctcgacaacctgtttagctcgtcggccgatgcctcgtcgagccgctcgcgctcctcgctcgcgtcgatcgccaagtcgacgaccaagggcgactttgccctcgacggcggctcggacgacgacgacgacgacgacgacgagaacgcgcagtacgtgacgctccccgagctcggcaagggcctcgcgaccgacggcagcggtatcgagcgctcgccgctgacggcgagcacctttgcgccttcggacgtcggcggcgaaggtggctgggggacgcttacgagcccgacgacgacggccgccggcgacagcacggtcgccctcaccaaggccgagcccgtcttccggtcaaacagggagtgacgcgccgtcgatctagcaccctcggtcttccactttgtatagcgcctgcctgcctcacgctctagatgtctgctgcctctcgtcgacttgcgtctgcgagatgagaagttgccacgcgagccgaagacgatctcgatcgtccgccggaggggccgcggcctccttcgcgttcagaagacgagacgccgtcggcctcgttgacgggctgctgcagctcgacagtcaactcttctcctcctcctgcgtttcctacctagctcctacggcagtggaccatctctccactcaaggggcatcgagtcggcacgcactggccccagctattgagagagctcgaccccgtggcacttagcggcggcggctccttcggcgagcgacaaacgcttcgctcgcccctacccggaagcctcctcccgggaggtcaacagctctctttggcgtgccgtcccatctctctgacgtctctctagggcctgcccgaccctgtcagttcgtttcctctctgcttgctggctcgttgccttggctggatcaacgctgacccgcccccgagctcatcatcctctcggtcagccccgcgcctctctcgtccctccgaaggccgacgctcgtcgcctggtttccatctcggtcctccaattgccagtattgctccagcatcagcatctgcagcaaatgatctcgccgggctcgttggcagacacggccgccgggaacgaccaggccgcccttagtgtcctgccggccctcgccttcttcgaggcccactcggcgccgaccttcatctggccactgtcggctgcgagccttcgctcggcgacgccgacccaagctcaggaggactgccttctcccggacgccgtttggacgaacgcagctgcagctgcagactcgcacgccagtccaggctcgtggctcgagcatcgtctcgacggcgacgggcaacgggcgatccgcggcctcctgctcgccctcctgtggcagcttgagcagcaggaaacgggccttggtgaggagacgatcggccgctcgaaaggtcggaacggttgcgcgggtgctagccgtgtgagctctgcgcctctgcttgtccgctgtcatgcgggagagccgggcgatgagacgccgcaggcctggtcgacctacgtcgttgcggccacgctcctcccgaggcctgcaccaagctcgccctcttacttcaacggctcagcctcgcacccgctagggagctcgacctcgggtaacacgccgactcaagccggccaggcgccgacgcccatgcccggcgacggtcaaaggaaggagctgccgtcggcgctcgttgtcctgcagcttcatcccgtcccaaagtcaccggttgcacggtcggtaccaactccggcccaaagggccagcaggacgttgagaccgtcgccacatacggcccttctggccagtggcaagcccctgagcggtgcggcgggcgcctcgaacgactcgcgctctgcgcatccgacaccgtcgccgggtgcgaaccctccagcagcggcctccagactgaatgaggtttctgccagcgaggcgccccgccccttgtcggttgccgcagcgggcttctcgccattgagggcgccgcggaccgagacgcgcgaagagaaggtcgcctggcgcaagcgcaagttcaacatgaaggaaacagtacaccggctccttgctgacgacgcgacctcgccgatcaagaaggccgaccagacggctgtctttaagagcgcgctcgcgatcgtccttaacaccgagaccgagtcgacgctctggtggtcagacgagcacatcgccctatgtccgtgccaggacacgacctctctgagtcgtgaaatgagcgctaccgctgacgcagagctcctcttgacgcagacaacgacgcctacgccgacatgctcggctcgcgtcaccctgacttgctggggaagggcgtccgcgaggggtggaaggagatcgccgacgaacttgggcggacgtacgatcgcgtgcttcacaacaacgagacgctacatcgcttcaacgagacattcttcctgaaccgggagctgccgaacgaagaggtcttccagacgtggtcgctcatcccggtcgaggacgagaatggcaagaatgttggcatcctgaagtacgtctcacctcgctcggttgctcaaggagccgcggaagccagctgctgatcggccggctacttttacgactctttcagccggtcatgggagaccaccaaggagtgcctcgccgagcgtcgacttctgacgctgcgcgagctggcgcaaaacacggcctcagcaacgaacgtcgacgagtttgcccgggccgccatcgcctcgctcgcagtcaacccgaacgacctgccctttgtcgcgctctacgtgtcggacgcagcggtgccgactgttcctggcgcacagacgacgccaggcaccacctcgcgcctgcacctccgaggccggctcggcatcccagaggaccattcgagtctccccaacacgctgtcgatcgtctttgaccacccgctggcttcgacccgaggaagcgtgtcggccatcgaccgctccgtctctggcaccacgacgtcgggcgcgagccatcctcgctcgttcccgcacattgccgctgtcgatcgtcgaccgtcgctctggtcgccggagtcgcacctcgacggcgagagcgaggccggctcgtctggagctcggtcggccatcagtgtcctttcgaacggcagcccgacggcgtggccgatccggcaggcgatcgtgacgaacgaaaacgtcttcgttgaagactgctcggacctcgtccagggattcgagatccgcagctttggcgagctgccccactcggcgctcgtcatcccatccgaatcggacggtgaggacggcacctcgcgcaggatggtcatcgtcctcggtctcaacccgcggcgcccgcatgacgccgacgcggaggactggctccgactcttgcgccgctcgctcgtcagcggcctgtcggccatcgtcaatcgggagtcgcaggtccggcggaccgaagagctcgcgcagctcgatcgggcaaagacacagtttttcagcaacgtcagccacgaactccggacgcccctgacgctgatcgccggcccgatcaaggacctcctgcagcttcagcgcgagggttcaatcgagaaggagctcttgactgtcacgcaccgcaacgtccagcgcctcggccggcttgttgatatgcgtaagcccagttctgttgcccggctgcaatagactggccgacgactgacctgcctgacgctatctgcagtcatggacgtcagccgcgtcgaggccggccgcatgcagggcctcttctcgccgcgccagctcggccgtctgacggccgacctcgcttctctcttccggtcggcaatagaaaaggccgggctcgagtttgaggtcgagtgggacgaggacgagactcgctgcgcctacgtcgacagcgatctgtgggagaagatttgcttcaacgtgcgtgctggagtctctgcctcttgactctcgacggcactgacgcccacttcctgaaccgcatccgtggcaactaaagttgatcggcaacgccttcaaatacaccctgaagggcatgatcaagatcttcatccgctacagagagaaggacgtcgagtttggggtcgaagtgcgtcggcccatatcgctcgcacgtctttgctcgacctctatttgacctgactctgcccctccccggcctgtaggacaccggtgtcggcatcccgtctgacgacgtgcccaaggtcgttcagcggttccatcgtgtcgcgacgacggctcggtcgcacgagggcaccggtgaggagcttgcacttctcggcaacgagcagcttacgtcctgatgctgacctgatgctgacctgatgctgttccctcgcgcttccctaggcgtcggtcttagcctcacgaccgagctcgtcacgctccacggcggccagctcgaagtcgtatcccagagtgcgtctgatggggcggcctccacgtcctctcttgcatgctgaccgcctagtcctcgttgacaacagccgcggaggagtctccagacggctcgcatggctcggtatttgtcgtccgactcccactcggcagcgaccacctgccggtcgaggccgtcgacgagacaatcgctccggagccgatcggaacctcgcgcttcaccaactcaatcctcgaagaagcctcgacctggatcggcgatgagcagggccaagtcgccggcctcgcaggcggcgtccgctctggcgtgagcaacaagtcgcagagcacgcacggcaacgagtcggcaccgaccatcacggacgtctctgacacgtcgacgaccctcttctgggccaaatcggacacggtcatggtgcgcttttgcagggtttgcctctcctgcagacgctgcattgctgacgtctctgcctcctttcgtctttgcagatcgtcgatgacgtgagtcagcccctcgcaggctcccctgtgtcagctcctgatctccgccaccacttcctcagaactacgacatgcgacgttatctccgcgccatcctcgagccctttgtcaccgtcctcgaggcaaaggacggccaggacgcgctcgacgccattgcaaaccacccgccggacctcatcctgaccgaccacatgatgcccgtcctcgacgggcccgggctgatcaaggccgcccgcgaacacccttcggagctggcgctctgccctatcatcctcatcacagcccgttcgtcctcagctctcggcattcagtcgtgtcaggcgctgacactcttaatcgctcgctctcataggcgccggcgaattggagaaggtcgagggcctgacgagcggcgccgacgactacttgccgaaaccgttctcgtcgagagagctcgtcgctcgttgtcacttacagatgcagatgggcaagaggcggatcgatctcgagcgacggtttgccgagcggacgctcgagctcaaggtccgcgccatcgaggccgaggccaagcgtaaagaggccgacgagcagcgcaggcagcaggaggtcagtcgaacttgcgaggttgccggttctgctgctggactcgcaactgatctcggcgccatcgctctcgtagctcttggtcgatgtcacttcgcacgagctgcggaaccccgtctctgccattctcaacaacgcttcggtatgtcggctcttccaaagctgctctaggcctcagctgatgacgacgcgccacatacagctcgtcagcgagaacctccgcttcctctgctctgagctccagaacgcgcataagcagcagattggcttcaagacgacgagctcgctcctctcgatgattgaggaagacatcgaggcgagttgaagactcttctttccagcgcggttaaagctgacctttcgtcaccccttcgttgaactcttaggctctggaggcgatctacatgatggctcaggtgcgtccgactgtcttcaccccttcagagcgcttttgaccctcttaatattcgcctcggaacagtcgcaagagcggatcgcaaacgacgtcctgtcgctcgctcggattcagatctccaccctcgagtgcgtcgaccgtcccgcgattgctctccgcctgtctctgccaacactgaccactcgccgcaggatcttccccgtaccgctcgacctgattgccgaaacgactcggatttgcgccgtctttgcgagcgaatggtccgtccatttgtactgctccgtcagctggaacggatttgctgacgtcttttccttgcctgcgccaatccagccggttaaagcagatccaactcacgctcgtccacggcgagtcgcttcgaagcttgcacaagctcggcttccagcgcatccacgccgactcgggccggcttgcacaagtcattatcaacctcctcagcaacgcaatccgtttcacgacacctgcccctgtccgcaagatctgcgtgacgatcgaggttcgcaagaacccgcccgacgacgacacatgcatcccgccgccgccgtcgccgaggctcgtgccgaccgcgaccgatgccggggacgaaagcgattgttatatctacggttcggttgccgacagcggacccggcctgtcgccggaggagctcgcccgccttttccagcgctttaagcaggcgagcgcgcagacgcatgtcggtgagtcgcgccatgtccacagccgtctacgctctcacgctgaccagctctcgctcctcccccagtctttggcggcagcggtctcggcctttacgtctgtcgcaaaatctgcgacctgatggacggcaagatcgaggttgtctcgctcggccgtgaggaaggctcgacctttcgcttctacgtcaaggccgcgctcggcgccatcgtccgcgaccgggcgaccgactcgcccgtcgaccggttgacgacacccgagccggccaagcccgtctcgtcgccgacgccaaccggacctatgtcgcgcgcgatcgtcctcatcgtcgagggtgcgtccgacgatgggcgcagctgttggcgacctaccccatcttgctgactctaatcctcttccctccttctccccagacaacccaatcaaccagaaggtcctcctgcgccagctgaccaaggcctcgatccgggctgagctcgcctcggatggtgccgaagcgctcgcaaaaattctcgaacgggcccaggcaggcacggcctatgcgagcgtcctgctcgacatcaacatgcctgtcatggacggcctgacgtgtatccgtgagattcggacgcttgagcgcgaaggaggagccttggccgcgggccatctgcctgtctttgcgctcacgggcaacgcccgccaaggccagatcgacgaggcgctcaaggccggcatggacgacgtcatgtgagcgacggcgactccccctcctcctgcgctgctgttccgctcgctgaccgacgggttgcactctctctctctctctctccagcctcaagccatacaagatcgacgacctgctcgcaaagctccggaccttcctttgagacccttacttctccagcatcccgcgaacccgtcccgcaatctccacctgccaacctagtcgtgtccacattatctgctgctgctgctgctgctgctgccctcgctcgctccatgttgtacattccttgctcttcgtcgttgtcctcgaactgctcctttactcgtagaatggctcgccctccctccgactcttggcccgcgctcatacttccgcatggcccttgactcgcgcagaagggtgaggacgcttgagcgggacagcccgtgcccttccatctctctcaagcctgacccgcgctacgtgcagggcggcaggtaattatgagcctcctcagggatccgactcctgatgacagacggtacaacacaacgcgtctctgcgcgcctcagcctcacctcagacgaccacagcctcctctcgcctcgtcacagccatcgttcttgcatccctcttagatcccctgtctcaaaggagcgccggtctggacgttcaggacttcgatagcaactggagaggatggcggccgcggatcaagacgagctcgaacgggtcggccggctgctccaggcgaccgacgaggtcagtcccgcctgcccccgccgagcgtcaggcgcccgggctgacatctcgacgctcgccctcgtctcgcacagccggaggatgtccgccgagcggcgttcgaagagctcattgcgctcgcgaggagcgccgaccctgccgtcaaggctcaggtcggcggtctgctgccggcgcccttcaccgctgtacgtctcgacgagccgcccggctgttcgagctttcgactgagctttccgtgaacgtgaccttcagtttccagatctccaggagcgtgcggtcgacgtcgtgtacgacctctgtgaagatgaggacggcgaggtgagcatcatgccgcttgatctggcagcgtgcagcaggcaggcgctgaccgcccggtccctcttctacgctactggtgcaggtccggcgatccggctacgcctgctttgccctgctctcggcctcgagtccggcctggatccagcgcaataccgacgtcctctcacagctgctcgccgtcgacgccgaagccgagcgcgcccagatccgcggcctgatcggcgagcacgtccggctcgcgccggccaaggcgctcagcgtcgtctttgacgtcctcgaggacgccgaggctgggtcgggcgtccaggacgagctcttcaaatgcttccgtgagggccagctcatctcgaccggtgccgagtggaaggcggccttccggaaggatggcgaacgggtgagcgcagcccgcagccgacgacccagcgaatgagcgacaacacgcgctgaccacggccgactgcctgcagctcctctcctcaacgaaggtcaccttatcggatgagcgtgcgatgctcatcctcgagacgctcgccaagctgccggacgactcgccatcgacaacgacagccttggccgaccgggcgctcgcctacccacctccgccgttggaagcatatgcgacctctagcgagcccttcacctcgctcgcctccagccttccgcacgatccgcggccgctcgcacaggtattcgttcgacagctcgaaaagcagccgtccacgctggtgcagccgagatgggcggagaaggcgcttgtcgcggctctgggcgagtgggcttcgctcgccaacaaaatcgtgccggactcgccggcgcacatcgacgccaggcgatggaaggagtttcagcggacggtcgtctccaacctgacgctgaagacccttgtgagtggcgccctcagccacagccctcctccattttcgagctgctgaccggcccgccgtctgtcagtcgctccttcgcactcaacctctctccgtcgccatgctagagtatcttttctggacgctctaccacctccaccacattgtgcgtcgcctgccaagcatgctgatgcagccattgctcaccctttggaccccttcgctacccctttgccagcctcacgtcgaccgaagaacgatcgcaaccggttcagccttccagcgaacggtggtcagcttgcccttgccctcgccggctccggtgtcgtcacccctcgctcggccgacggcgaacctcaccgccctcctccgtttcttccgcgaccgcccggctcagcctgacgccagcgggtcgaccgaggccggcccaggacccatctttgccccgcccagctcgagcgcgtcgagtctaatggcgggcatcgggccgctcgcacacctaggcccgtcttgggtagttccgcgctcacgccttcctccgccaaacggccggtcaagcacgtccgatgctcggccgccgcaacagcagcagcaacagcagcggtcgtgggtggcggcggcgccaaggacgtctgcagggcatatgatggaccgcccaggaccgacgacaacgatgagcgatcgacgaccaccggccggaccaaggagggcggaacgggatccgcgactggcggctgagtcgaggggcgttcactctgcccagcgggctgagtcgtcgacggcgccgcctaccggtccctcgagacgcgctgtcgtgacctctctgcggccgaacaacggtgcatcgtcgagctcgagtctgctcagccgcatttcgccgagctcgtcgggcacgtcgacgccccagccgagggcggtggcgacggctgacggcaggagcgtcccgacggggcctcgtggctcgggtcggacgatacagcagcagcagcagcaggggcagcagcaggacctcatcgagggcttctcaattgctggcagggcaagcggagcccagcaggcgtcgatgaccggatccgctggcgagtcgtcctctgtatcggtccagccaattacgtacgtctcgaccggctcgcagctgtcgcccttctctcgtgatctcgactgaccttctttgctcgccttcttcgcttgctccgtatccgctcttgcctcgtctacagcatgggcatctcgatcaagggccgcggcgcccgtcaagcctcacttcttccgacagccgacgctccgagcgggagcacgaacggcgacgctccgtcccagtccctttcggtcgaccggcagccggcccagccgccagctcgcggcctgctcgagcgtctgggcggcacgagctgcggcggtgacagttactcagacgaggacggcggcggcggtggcggcggcaccggttcacggaggaagcgcaagtcggagaacgagcgctggggaggtcaggctcgaggcggtaatggctcgtcgtcagagtcgagcaagcaagctcgcttctgacgcccgctcgcatgcagcccttcttggcgccctgccttcacagccgtgctcgagacgcgacgcgggctgctgcgccgccgtgccttcttcttgcttttcggtggctgagtgagtttggcgcgtgacagggcgcgacgcggagcgacgaggcgacgtgcctgccttctctctccagcaccggcctaaatcgaacaagggcaggtcggtcgtcgcttgatgaaggggagcgggaggacaaggccgggctccgggggggcgccacacttttttgcgaagaacaaggcatgaaagggggtgcttcgaagggaaaagggggccttcgcgcgctctggtttcaggcccgtttccgcgctgcgcgatgagttcgatgggcgatctgggccgtcgcccttcttgaccctcgctcgacgacgacgaccatctcctccttctgctcgaacggagacagcacggccgagctcgtctcttcgcttcggccttgaccgcatcagcgtccgccatccgaccctccgacacgacggcctgcagacgcgagcgcgcccggccagctcaagtgcgtgaccgctccgcccgcccttcagctgcctactctgcccgcctctcccaagcccaccactccctcatggcgctcgctccatcacgtttgcattcgctaagacccgccccctgctctgaatctcctctgcctcgcgggtgattgccagcagatcgaaaaagaggcatgaatctccagcaacgcctgccacttctgtccccttacatgccgacccccttgacgaacatcagaccgtcgaagagagcacgctcgcggaaggccttgtccttggcggtatcgacaggaccgcggattgcgaagccatgcttggcctggcacaagacgaggagacatagtcagaggagagctggcggctctttgggggcatgacgccgagtacgcacgcccttgtagaccaagacctctgatctgagacaggcgtgtttgagccgcagatcggcaaagacgctcttgaccttgcgcacccgggcgagaggcatccattcatcctcgtcgccgacgatgatgcacgtcggggtcgcgatgcccttgaggtcggccggaacagcgacaagggacttcgtgtaggcgagagctgaaacgtcagaacgacgcgcccaacgagcgagcactaaagccgacacgacacgacacgcaccggatggtacgcaacggcagcatcgaccagtggcgagggaccggcggcggcaaggagggcgtaccggccgccaaagcagaagccgacgacggcgagatgctcgacgtctggttcggctcggacggcctcgaggtagtctttgacgatcggccaggtcactgcgagcggagaaggagaatgcacagatcaggaagggtcaaagaggcacgcttgccgagggccaggggaccgaccagcctcgcgatgcttcactacccacggtgctgcaatcgtcgccagcttgcgcactgtcgtcctgtagcacaacgacccgactggtggaagtcaacaggcacatacgagagcaagaagacatggtgcgccacgtacaacttggttagcgtctttccgacgatgcccttttggactttgagtgccgcgtcggcagcggcagtctgcgacagtgggggacctcctcgtcagcgctggagcacgccaggaaggcaaagagcggccttacgagcatgtcgatcggcattggatcgccgccgaggatgtcagggaaaagaacgcggtagccctgggcggcccagtcgtcggcgacgagctttgggttcggatagccgtcgacgaggccaaaggcgtcgctaaggacgagacgtgcccagatggtcagcgctttgcatgcgatgcagacacccatcgttgaacgcacgagaggaaaacgaccgtcgtgactgccgccggctgcttgctcccgacggcggcgggcgagacggcataggtctgcaggccgtgcaccccgcggcaggctccctttggcgtgcccgggtgaagagcgccagtcgtgcagcatgcagggagtgcctctgtgacggtagcgttaacttcgaggtccgacattgcagtcgagggagacgaaggagatggtcagaagtggaagcgggaggggcgcgctacccggccggaagcaaggcggcctggctgctgcgcgcggactgcgacttgacaacctccagcgtaccacctgccgtctgcgcgttcgtctaggtcaatcatacgatagactgcgaggtggtgcaagggatacagtaaagagagggtcgggcacggttgggcccgtctaccgtccaaagcggataagcgcttgaatctagaggtgggagccgtccttcttttcgttgccgctgtcaaagatcaagaggaggcggtcagtcgtcgccaatagaggggggttgaataacagagaaggtaggtatgcacccgtacgagctggtgtcctggtccgagacaggcttctcggcctgcgacttctggccggtggcaatgaggaacgtctcctgcgccaccttctcgtcgctgaggtcggcgatcggctcaccgaccgagatctggccaatctggacgatggacgtaaccgtctggacgccggggttctggaagggcagcagagagggtcagcgagcagccgaggggtcagagggacggctggcctacgcacgaccttgttgtccatcgccttggtcttcttgccctcgatgatctcgcggcaaagatagggctcagcggtgagcggccgagcaaggccaatgatgtcagtcgcgccgtcctgaagggccttgttcatggcgtcggccgagcggaagccgccggtgacggcgatgcgggcctccttgatgagtggcttcatctgctcgctgaactcgacaaaaaagccctcgcgggccttagtgctttccttcttgtgctcgaagccggtctgctcgtacgtgccgccggagagctcgatcaggtcgagacccttggcgtcgagccacgaggcaaccgtccgcgactcctcgtcggtgagaccgccctcggaaaagtcggccgagttcatcttgatcgagagcaggaagtccttcggcacgcgctccttgatggcatcgatgatgcgcaggatgatgcgcgcgcggttctcgagcgagcctggtagagacgagggtggagggcgttcgtaagtacttgtctggcggcaacactcgatgcgggcggccgcacctccgtagttgtcggtccgcttgttgacacgagccgacaggaactgcgagaggaggtagccgtgggcaccgtgcagctgagcgccgtcggctccggcgtcgtagagcaccttggcagcgtaggcaaatgactcgacgagcgtgtcgatctcggcaatcgtcatcggccgcggcttgttgaagaccatgcctcccatcggcgggcactgctcggacgacgacgagtagggctccgcgttgatatcctggcttgtctgccggccgccgttcgtgagttggccaattaccaaactaccctcagcctggcaggccttgacgacgggcttgagggcagagacggcgtcccagggctgtccagggggcagcgcacgacgacgacgagaactcgggtcagccgtcttgcagcgcacgccagcttcaaagcctaattcactcgtcttgcaacctagcctcagaagctgggtcgacttaccgagcgagggtcgatgatgacattcttcttggcctcaagctgggtccggtcgacggggatgttgccgagaacgatgacgccgatggcgcccttgccccactcctcgtagagcttgaggtactcgggcgtcggcttgccacgctcgtcatggttctcgtcatcgtaggtgcagagctggagaaaggatggcaagtgtcgggcgtcagcactgaccagactatgggggcgactgcgggcgcaatagagccggacgaacccgctccgtcacttgtgacgggcacagaaagagatcgatagggtcagcagaggtgccaagaggagcggcgggcggtccaggcggtcacgcactggctgacttgaggaactgagagaaggggagcaggcagccagcagatcagtaagagagggggcaagctgcgggtcagaatgacaaagcgtatggctgacgcacgcggttaggggccttcttgccgctgtgcttgaaggtgatgggcgaggcgacagtgacagacataacgggcagagatctctagggcgaaggaaagggaagagcgacggggaaggggaaggtgagtggttcggagtgagagggacgacgagacgacggctcctttgaggaacgagatcggggggggggtggaggggccatgcgtcagcaagtcggcagcagcagcaagcggggcaaacgacccgggttcctcatccccgagcagaccatcgcactgtcagcaactggccagagggagtccatctaacacagcttcggaccagcttgcccaagtgaggcgaggcgagcctcggccaggtgaaacggaccgagcaagcgtcgagctctcgtccgagtcggcagctcgactgcgccgccagccgctggacgtatgtagggccgggtgtaatgcactgctctcgctcgtcagtcggtcgatgactatcaagctggatgcgatgaccagttgagatgatctgcacaagagagagtggcaatcgagggcgtgccactaggaggcagcgcaagactggccgacgccggctggctcgttcgcctgcctgacctcgacgtcgaccagcagctaccgcatcccttcgatgacgttcccacccgaccggcagctcaggctgctcgacctgccgaccgaagtgcttctcaaggtgcgtctgctccctctctcccctcgcttgaggcgaggagctcagaagctgatctcctctgagcgttgccaggtgctctgcaacctctcggctaaggatctccttcggacgacgctggtcgcctcgccctttcaccggctcgtcaggtacgaacgctagctcgaggagagctcggagcgctcaagctgatgtacagcctttctctcacagcgagcacgtctacctccgctacatcctcgcctgctggaagcacggcgtcgtcgacgcccatccgccgcttgacggctcgccggctggcagcgacggctaccgacgtcagaactggacggctgctgagaaactgcagcgtctggtcgaccgcgagcgtggctggctcgagctccagacaccctcggtcacgatcggcgtcgacggcccgtgtccgatctacgaactccaggcgggcgtctacgttcgcggcgccgactacgtgccgtcgccgggcagcacgcacgaccgaccgcaggcgctcgaggttcacccgctaccgtcggctgagagtatcaggaccggctctggcaactaccgcaaggtcgacgtcggcgtgcaaacgctccgtttcgactgcgggccctacctcgacctgacgctcagcccagagcaaaacctcatcgtcatcatccagcgcttcgacccgaagcggcacaaccttccgcacaagcgggactgccgacgctcggccagccccgagaactcggtcggaagcatcgccagcggcgggtccgactttgggtcatccgatgacggctgcgcctgcggccgaccgtcgtacgcattgcacctgctgggcatggacggcctcccgcggaccgacatcgccaccagcattctcctgctcgacgttgccgacccggtcggccgcggctttggtgacggcgactttgaccagacgaccatcgagcccgcgcgcttcctgctccagatctgcggcgacactctcgccgtcatggtcagtctcgctgcagccccaatccgaacaggtcctggactgacactcacgcttgccacgtccttcaggttggcggtgccgaagagggcgagcgcaacctgatccactgctggaactggcgaacggctcgagacatctgcgtgcgttccgtgtctgcaggttggccctttcgtttgcgcctcagactgagaccatactgcccaactccctacatagacgcacggctacctgccatacgaagcgcctgagtttcactacacgtccttcctcctactgactccgacggcctacgtcgtgtcgtacgcgccccggacaaactcgccgacgccgtcgctccagctctttgacgtcgcgcacggcgaggcccggcatctttcgacgctcgggcttccccgacttaatgcgacgctcgcccggctgccgatcccgctcgcttttgagcttcggccagacccgccgtcgagtgcgagcgagcggctctggggcccgcagctcgacggcagcagcgccggcgcgacccggccctttgcgacggatccggaacggggcctcatcagcctcgacatcaccgtcggcgactcggccttccactttcacctgctcaaggagacgctcatgcaggagctcgcctgggggagcgagggccggctcaggacctgggaagagtgggggcccaaggccgtccgggcctggcagggctttggtcggcgcaactgggtaacgcacacggccggttaccgtgtcgtccaggtattccctgcgtcccaggagaacgacgacgacgacgacgacgacgacggcaacctgacggcgcgcgagctccggctctttgacttcaacccgctgcactttgcgacgcaagacgggtcaaaggacgagccttggttcttcaacacgaagccgaattccattttccgacgccagatctgggagaacaacatcacgaccgagctcccgttccggacggccgtcgttagctcgctctcgtcgcaccgcgcacttggcgtaatgctcgacgacgagcgcatcatcacgacgctcgccgccaacgacgtgagtgctgcctgacgccgccacttctgcgtctgggttctgacaattttccccttctgccttcgccccgtctgccttgctctgcagggcgtctcctggcactttgtctgccaggcgatgtagcacaattgtatggccctatggctgtcagtcgggccaaagggcgggcgcctctcgtccgcaaggatcggtcgcgcgcccgtcgctcaaaaggctgtcgtagacagctcgcctgccgatcgtgatgactcaccggatagcacgctcccatctcgaatttcgtcgtatccatgtctgtgcaagcttaatcttcatgcgagggctagctcgctcgtgagagaggtcgagaggcatggcgcgcgcgtgcgtcttcgaagagcagtcgcgtcgcgtccctccgctcgcgtctctgccgacaccgaccctcgccctttccctccgcttgccaccacctccaatcatcctcaggagcgaaatcaacagcagaaccgctagaccccagcgtgccacccttcctccctgtctccgcttgagactcgagctccagccggcacgcgcgactcaaggatgaaaccctcatcctcggcgccctacacgccgggccggtcggcctcagccctcggccacaacgcccaggacggcagcatctaccgcgcatcccgagcggcgaccatcagcaagcgcgaagagaatgcggtacgtagccgtcctacttatcctcggagtcggcgaacgctggcgaagctcgctggcagacgcaaccattgctcgtcgcgagctcctgatgctctcgtcgagctgtcgtcccatcagcccccttcgactccttgctttgaggctcatcatctcaccttctctgatccccactatcagctcctgagtgtctttgcctcggcacgcgactcggttcgaaagccagcgaggccggcgtcggagcccaacctcgagcgccaggaccgcccgccgacgctcaacctgccttcatcttctacctcctcgtcctcctctcttgcatccggagcgcggctagaatccactcatcgctctgcaggagccacatcgccgtcgtcctcgtcgaggcgtcggatgtcggaagccagcggtgccgagcctgcacatgcgccgcgtcaccgaagcaccctcggcgtcaagcgtatcgaggaggagcatgaggacgaggacgaccgcggctatgaggcacggagcagtaacagcaggcgcgatgacggtagtcgagccgctttcgagcggaaggatgagggcgtcgaggccgccgaggcgcccgctaagcgcaaggagggcaagagcagaggtgcgccctgcccaggcttccgacgccgggagcttcaaggactcctcgttgacgactgggctgcccgtttcgacctcttccagcccccttgcaggccgaccaatcaatcgccggcctgctgccagaaatgtcgttccacacgcgcccgctctcgtcccgcatccggccggcggccccggtcaactcgccgtccaagtcgggcgggacgcgtcgggtcgagtcgctactggacagcgtgccgctgcacatccaggaggcactcgtgctgcaagacctgctctctgtgctcaacgtgcgtcttacttgtcgatctccgttcaaagtgagacgttgacggaacgcgctcgacggcacgcgcgcagggcatcgagggcgacttgatcacattccaccccgactacgaccccatggacgagcaggaccggatcaaggggcctcagtgggtgattgacgttggactcggtcggtccagtctctctcgtttaccttgccttggcgacgcaagaaggcgctgaccacgggctccacccttgcccgacccgacagatccgagcctgagcaccgtcctccggcgcatcctgcccgcagccacgttttacatgggtatcgaggcctttgtcgactcgcgctgcgccatcgactttggccgcgtgaacggcgccctcgccagtgggctccgagcgctcctcctggtctgtcctcggcgtcttgctgcggcgttgtggccgcttcagccgattcttccactgacgacacgccgaccctcattccgcaggagtaccacctcctcctgacgcagctcgagacgctctttctcacgtcgccgacatttacgctgcaaaaggccttcttccatctgcacccgacgatccacacgctctcgctgctccattcgctgacgacgacgctctacgacgccgacgacaacgaagacgttgacgaggctggggaggaggagagcagcgaagatgaggacgcgctggcgctcgggctcggcggtaacgccctcaagggcctaatgaacgcgggtgccgaggctggccaggaaggcgggggtgggctcgtcaagggcggcgaggtgcttgagctcatctggcaaattggccgtcgtatgagcgggtgcgtccctccgctggcctcagctgtgtcagaggtgggctgctgacgctccctctgcagcgatccgacggcgcggacgctctacgcgacgctctttctgcacgcctcgcaaccttacgcccagatgctcgtccgctgggtgtcgtccggccacctttcggacaagcacgaggagtttctcgtcaaggagtcaacgagcatcaccaagaagcaccttgacgttgactttaccgacgagtactgggagcggagatacacggtgcgtcagcgggcgccttgctcgtctctgccgcgcgtcatcgggcgccttgctcgtctctgccgcgcgtcataggctgaccgctgccgcccgcactacagctgcgcgacggctcgacgaccgcccagccgtaccgcggtaaggcggcagcgacgacggccaacggcatccccccgccgcgccgagggacggccggcacgcccgactcacgcctgccgggcggcgcctgcattcccaagtttctcgaaccctggaagcacaagattctgttggccggcaagtacttgaatgtcatccgcgagtgtggggtcgacgccgaccgcgacggtaggccagccggcctcggcgacggcatgatcgacctcgaggatgagaagtgagtcctggctggctcagactgacttgaaaggaggctcacgtctgtccgcctgccgcaggtttcatcactttctcgaggaggcctacatccacgccaacaagacgttacttaggatgctcgttgacgagcaggacctccagtcgcatctgcggtccgtcctggcctcgatcttggcgatcccctcagagctgattccccggccggctgcccacccccatccgcagctcgctcaagtaccacttcttcctctgccagtcgtcgtggatgacgcactttctcgacctgtcgctctccgagttctccaaggcctcgcgtgcggcctcgctcgtcaagctccagtcgctgctcgagctcacgctacggacgtcgggcggcccggtagccgagacctaccgcgacaacgtcaaggtcgtcatggcgtcgcagaagctctacgactttctcaacacagttgtaaaccaaagcggcgacatgcctgaggccagcgccgacaagggcggcaaaagcgccaagggctccgagtacggcggcgcaagcgtcgtctcgggctcgcgcaagccagaggagaagaagcgcgagctcatcggtgagtcgcggttgcgttcgtcgctttgctcgttgctctgcccggctgacttcggccgccctcatcttcgccagcgttcgaggcgttccagctcgactataccgtccgcttcccgctctcgctcgttatatcgcgcaagacgatcgcacgctaccagatcctcttccggttcctgctccagctgcggcacgccgagctccagctctcgctcatgtggaccgagcattcaaccgacgactggcgccggcggtccggcctgccgtccttcgaggcctggaagcagcgcgtctttgcgctgcgggcgcggatgctcgcctttgtccagcagatgatggccttcgtctcgtacgaggtcatggagcccaactggcgcacgctcgaggaccggctcgccaaggtgacgacggtcgaccagatgctccgggatcacgtcgactttcttgacacatgtctcaaggaggccggtctcaccaaggcagagctcatcgcggtccgtcccgtgtcgactggcgtctcccgcgaacagggatcagcgactgaccaaacctctccgctttactcccctgttcaccaggtcacctcgaagctcatctcgctcatccagaacttctgtcatcactcgaagcatctgagcaactacacgcgggttgcggccgagctcgctcgcaccgcagcgccagacgtcgaggctgtcgtcgacggcaaggcccaagagcgaaaagacctgctcgaaaagtgggagcgcaactttgaccataacctcggcgtccatatcgagcgcctgacattcctcggcggcagcgacagtgcgtaacgtgtacttacgcgcctgtcccctccctcgactgacctcctttcttgctcgcagacaccgcgctcctgcccctggtcgtgcgactgacgagcatacgtcggacctgagcgtcgaccgctgcccatctctgcttagcgcccggtcgtgtccccgatacccgctcagccgtcgatacccctcttctcgcccctgatgatcctcatgcccggccgacatcccagtctcgtctccgcgtccaccaagagccaggacttcaggcgaagcaaagcaagagatgggatccaagagtgatgatgaggggaagcaaagaaggaaagaggcaagctctagattacgtgataggcgatcggatgcggcagtgcaagagagaacagagtgcgatagtgagtgatggtacacgatgggcgagaccccgactgcgagagcagaaaccgggagtcgcgccatctctacaagagcggaggagcgggcaggggcaggccggctactgctgcttcgggtgagcgacggtgacctcgtcggtgtcgagccgacgacgctcggcgtccttctcagaagcgttgaaggcctcctggttgatcgcccgctctgcggcggccagggccttgttgcgcgtcgtcttgtcgagctgctcaaagtactgggcgaccgactcgctaatgtggtgcgtgtcctcctcgcgctcgtcgagcgggacctcgtccgtgttgtccttgagcttgcgcgtgtaagcggccgtgagctcggcaatcttctgctcacggtctttgacggggtcgtaggcgaggtggcgcttgaggacgtagatctcccaggccgacaggtgccgccggtggacggcgatgccgtggtagtcgccctcgcggccggcgaggacgcaagcccagtagcgctcctgctcgcgcaggtcgaggccggtcgtgtccgggatgaacagggcagttaggccccagccgaggaggccgaaccaggtgacgatccaaaacttggtgtgcgtgttggtaacctggccgtagatgatggccggcatgagtgcaccgatctttccggcagcggccgagagaccgtgggcggtcgcccggattgaggtcgggtagacttcggccgcgaggaggaaggtcgtcgagttaggtccgagctgggtgaagaaggaggaaaggtagctgaagggggaaagcaaggtcagccacagcaggcggaagcgaggcaaccaagagaaagacgcactagatggcctggaaggcgtggatgtttgagggctggagcagggtgtcgtaccggacggcggccgacagaaacaagacaaacatcgcgacgaagccgaaggtctgcatgcggacccggccgaccatcttgtgatccatgaggatggcggcgaggtagtagccgacgagagagacgccctggcgggttcgacaaagaaatcggctgtcagcgttgattcttgggaacggaggcgcgcggagggtggcgcacaatgttgatgaggttataaagccagccgtccatgacggtgggcttgccgcccgggacaatgaccttgatgaacgccgactggaacagcttgttgccgtagaaactgttgcacattcgcaagagccgtcagtggatgaagatgatagcctccgcaaggcgcacgcacaagaagtcggcggccgcccagcagccggcggtgccgatcatccggcctccgaagtgcgagacgcagagcttgaatgacttgatgtcgtagccggtgacagcaccctgctggcgcttcttggccttgagcttctggtccatcgagtagtcggcccggtagtaacggtggtaggcaagccagagcgtcatgacggcgacgatcgcaaactggacgcggaaggtccactgggccgagaggatgctgtagggcgggttgcccgagccgtggtggaagatgatgaggaggacgatcaggatgacctggttgaacatctggccccagccctgcatcaggaacgtgagtgagacgttgcggccgcggtggagccggtcgttcgacatctgggcgggcgaaacacccgagcgagcctcgagcgccgtcgtggccgtcatcgggtactcgccgccgacgccgatgccctgagggaggaggagcgtgtcagcaaaagcacgagtgaggaaggaaaggagaagggaaaacggaggtacatagatgaagaggcaccaggcgtagcagatcacccagccgttaaggtcgacgccccacgaggcagtgagcatgatctgtcaagagggaggccgaatcgaggtcagcgcgttcgttctaaaggccagcagcgagccaggcacgcacaagaccgagcgtcatgatgagcgcgttctgaacgagaccaaacttgcggccgacccagtcgccctcgaagccgacgaggatctggccaaagatgatgccgaggatctcgaggtactcgatcgagtcgatccagccgcggctgcagacctggtgcgtcgaccagcacgacggccagacggccgcatagagcggtttgaggttgccgatggaaaagagcgtcgagccctcggtaaacatgcccatgccggggacgacgtagcgcgaaaagtactcgcgggtcggcgagagggggtcctgaagggtgaggccgagcgacgcgagtcagcccgcatccccgcgcgcgattggtcggcagccctcggtcgaggtcgcaccttcttggtcatcttccagaggacgccgagctcacgcttggcttcattgttcgactgccagaaggcaaacttgacgcggtctgaaagaggtgccaaggccgggtaagcgacgggccgactagagaggcggcaagcgcccccgcacgagtctaggccgccgacgcaaagtggcccggcaagcgtcaagaagaagaggaggacgcaccggcccggggcaggtcggcccagtaggtgcccttgtagtatgagtctgacgggtgcaactcctcctcgagcagatcgaggtcgctggcgttctcgtgcctgaagtcgctctcggccgacgacgtctgcgagacggttgcgtcgagcgtaggctgcgcgcccgcgacaaaagcagaggcggcaggcgtcggctgggacgacttgcgcgccggcgcctggcggtcgacctcggcgagcgggtagtcggcagagggcatcgagcggaaggacgacgaggagagggaggaaggggaggggagaaggggagtggtggtgagcaaagaacttcagagggagagcagggctgaattttgggtcgagcgaagggctcggccggcggctcgcccgcctcggcgggggtgggttgcaggccccgcaaatccgacttgcgcagcgccctcacgcacggtcgggtcagccagtcgctggtacttcggagaggggtcaggcagccaaaaaagggggcaagttgcggaagagcgggagagaaggaggtagagctcggacgcctgccccctttaagtacttgcccagggaagggcgaagaacgaggcgctgcagggctgggcgagctcttgggcgatggtcaaaaataaaattaaagggcgtcttggccttttcgagcgacggaagcagtgcgcgtggcctgaagcgcagcaattaacgcacggtcgacctcgggcaggcaggcaggcaagcgagcagcagcagcaaggtgccatgatttaccagcctctcggcggcccactcctcagccgggactcgcgttcctcaaagaggacgcccttgggtgtcgtcgccaggagcttctcggcccagcgcttgccgccgccctgctcgtcctcccagccactctcggcaagtcgctggccgaggccgacgagcccgtcgacaatctgagtgaccggctcgcgcgcccacgatcggagggcggccgcgtttcgcacgagtttcgagagccggccgagaaagcgcaagcgggcggcgtaggagtcggggctgaacgccggcgggggcgagcctgcatgggcgagcgtcagcaaggtcgacagcgtgccgagcgcgtgctgaaatggcgcgaggacggtgttgacaagggcggtgaagcgggcgtggggagcgccgtcaaagagcgactcgatctgctcgagcaggtcgaccgcccggcgcgtctggcccgacgagtacggatcgtacgcgcctggcgtcccaaagacgacggcgagccgaggcagtattgtcgacgtcatgatcgacaggacgaggtcgccgtcggacccgagcggcggctcatcgtccatctcgtcctccgagtcgtcgtcttgccgcgggagctttggccgcgagtaggtgtaaagcgcggtgtagaagcgaaagtggtcgagcgtctcgggcgactgtggcaggacgagaaagagggaggggccgggtcagcagctacgcctcgacgagcatcggacgcaggcaatggccgcaccttcaacgggtcccagccggcgacctcccagcgcgcccagaactcgagcgcagtgacgagcgcctcgccgccccaggccatgcgatactcctcgccgccctcacgcgtgcgccactgatcgaaacgctcgagtaggccgcccggcgcctcggggtccttcatctcgatcgccttgacgtcgtcaaagacggccatccgccgcgcgtcgagcgccgcccgggcgaggatgtagtcggcctcgtccgattgaggcagcgcggcgtccgtcaggtagccctggtcgagcggtgactcgaccggctctgtcatggtcgaggctggcgatgttgtcgaggaagcgagccgtgccaggcgcgtcgtccgccgcgacgtccggatgttggccgtcggcggcaaggtgaggttgctgagcaagcgcgagagcgaatcttcctcgtccgggtttgctggcggaaccggggcgacatatggctggagcgtcgcaacatcgacctcggtcggaacgccgagacagagggcgacgtcgtcggcgtcgtcctccatccggcggcgggcgaccatgccatggcgctcttgcatgagctcgaggttctcgcgctcaaccgcctcgagctcgggaaacttgatctcgagaaactcgccgagcatttcgcaccacgcccggaagccctcggcccactcgcgcttggtctcgacccgctcgacctctttccggagctcgcgctcctggtcgtcgagcgctccaacctcggccgagatctcgttgatgcgatgcgtcgattgagcgtgcgcgagggtcagatttgacagcgcggtcgagagccgcatcgaggctgcagaaagcgtcggcaggggcaggacggcgggaactgtaggggggaagtcgttcgtgtcagcactcacatcgacgctgaaagcgctgaagctcggcacggacttttggccgctcgataggactccttgggctagggatgagacggacagcgatgtcagaccagcgactctgctcgccagggagaacgaatcgcgcacctggtcggccttcttggctggctcggcccccaagttagctcgcctgatctgcgactcttcccactcctcgtcgctttcgtccatctcctcgatctccctgcgcaagcgcgggtgacaaagaaggagtgtcagcctggcctcggaccacagaggggctctgaatgcaaagacgcaccggtcctcaatcgcttcgcggatgccctccctctctcgcctcttggcctccttcttgccacgcttccctagcgggacgcgctcgtccgcgcccgtgtagccggcatgctcgtcctcgccgtcgccggcctcgtcatcctcccggacgaggcgcgagccggccaggtccgaaagcgagccttcgtcccggatcgagacgactcctgagcggccgtcgagtgcgatgaagtcgtcggccgacgacggctcctgctcgtccggatgtgatcgcaggtgtgaccgcttggccttggccgcgaggatggcggcctcggtcgggatggcaggcgcgctgtcggaggcgaggcccgcaaaggtcgaagcctcggcgtccggcttgatgccgtacttgatcatcgtctcccggctgaggccctcgctgacggcatcctggtacgacagggtcgacggacgtgagggtgtcgatgccttgagctcggagaggtaggccgacgagtacgatgacgacggcctgccggcggccaagggtgagctcggcagaggcgcatgcgacgagatggcgcgggacagggccgacttcttaggcacgaacgatgacgaggacgactcctggcaaaaggggggggggttgcagctgagcgtcagcagctggtgcgaatggcggaccaagccggcactcacgtcctcctcctcatcgccgccgaagctcagcttcgacttggccttggcctttcctgcgctgccggcagcggtcccgcccgtcttcttttttttaatgcgggccgctcgagcggcagcgatggccgcccccggcgagtcgtcgtcctcgccgtcgaggttggctaggtcgatagacaggttgccggccgaggagaaggacgagtcggccgcctccgacgcgtcgccgggagtcggccgcggcttcttgagcttcttcttgaagaggggcgtcgacatcgagtccatcctgcggagctgtggtccctctgagaagagagtagggcttggaagctgggggcagggtgtgctggttgagggtgcagggggagccgggcaggcgaacggacgagagccgaaggccggccgcttcgctgcccctccctcaaccgccacctcgtccaagaggcctttccaactgacagacggcatggcatctacatcggtagcgacggcctcgggcagcggcagtggcagtgcggccatctcgacccggctttacgtcggcaacctccactacagcgtcgacgagtgcgtcccgtcgggctccttctcgtcttcctcctcccagcttgcttgggctgacccagcgctccctccctcaacctcctcatctgtccccgcgcgcaaggtattccctgatcaagatcttctcccgattcggcaaggtaaccaagatggacttcctgttccataagacgggcgagcagcgaggcaagccccgaggctacgcgttcgtcgagctcggcacccaggcagtgcgtccctcgtctggcttccaagtaggcctcgactctggtcctgtgaggtctagctgagcatttcagggctgacgtctcctttctccgacctcttggccgccccaggatgctcagaaggcggtcaataagctgcacgaccaccctctccgcggccgcaaccttgtcgtaacgtatgcgagccaggtgcgtccaggtcccagccagtcagcccgactgtcgaggagctgagccgctggtgttctgcctgatttcagatgcggcaggatgcgggcacgggcggcaagaacagctcgctgatgggcgaccggcggacgacgctgagcatggtcaagagctctggcaagaagccgcaagggtttgtacttcactcctcggagactgatagcgtgtgacgtccgtactgacagtcaggcgctcctccatctcatccagcgcctccgcccagattgctgcgctcgaggccaagctggcccaaatgaagaagagcgcgccgtcagacgaccccttgcaggagggcgacgccctttgctcggtccctggcttctcctcctccggcgtcggtactccactcgcatcgtcgacagcgccggcgtcgccagcagcagcagcagcagcagcgggcggcagcgagacgccgccatctgtatccctgagagaagcaggggcctctacggcgacatcggccgcgcccgccactgttgcgccgaaagcgccctcggcagctttcacagccggcctggcaggcctcccgcctcggccgagaggcatctgagtatctgctcggtgcaggcagcgaccgcagccggtcgcacgccccgactcatgtcgttgtgtctttgttgtacgattgtcgacggccgctggagtgcggcccgcctgcatctcatgcctcccgattgatctcgtcgaagaggaaggcaatggagagcggttggagaagaggagggggagtcgcagggccagcaggacgagcgcgcagcctcggcggatccgctcgccctctccctccctccgacgccatctctttccggcaagcctcacagctgcagccaaccctcagacggcaatccagacagcgccggcctcttcttgctcgccccttctctcgaggccagcatgatgaaccgcgtgccgccccaggcgcagacgtacgggttcccgacggcggccggcctttcccacccaggccagcagcagcagcagcagcctggccgcgcgatggcctcgcctcagccgccgccgccgccgaacaagggcacgctcgtccccggccaggtccttcgggtcggcaagatccaggtgacggtcgagcgctacctgtcggagggtgcgtccctctcaccgttgggcgtccttgttgcaccagcgccgggagagctcgctgacgctcccttggcggcctatataccctccgctgcggctctccgacaggcggcttcgcacacgtctatcttgttaacacggccgagccactgcatggcggtagtcggacgcatgtcctcaagcgcgtcgccgtccgggatcgcaagctcctggacgaggtccggcgcgaggtcgaagtcatggtgcgtttgtcgcgcagcccgcaaggggtccaacgggcggtgctcgaaccaagagggagagcgaccgccgagcgtccggggacgctcgaggcggccgcatcgcaagggagggcacgagagcggccggtctgatcgttgggcgagctcgccgaagcagccagctgaccctgcccatcgcacccctgcgccccccctccgcgggccggcccgtccagaaactgctccgcggccacccaaacatcgtccacctgcacgacgccgacgccttccacctgccagacgggacgcatgaggtcttgatcctaatggagttctgcgccggcgggggcatcatcgacctcctgaactcgcgcctgcagtcgcgcctgtccgagcacgagatcctccagatctttgtcgacgtctgcgagggcgtcgcaaagatgcactcgctccggcccaagccgctcgtccaccgcgatctcaaggtcgaaaatattctccaggctggcgagcggtcgttcaagctgtgcgactttggtagcgccgcctttccgcgcccgccgccccaaactctgcaggagatcaaggacgtcgagctcgacatcaacacgcacacaacgatgcagtatcgctcgcccgagatggtcgacgtttaccagcggcgacctatcgacgagaaggccggtgcgtccgcctacagcattgcgcaatcgagaatcgctgaggctgacccgctcgctgatcctccgcctgaccagacatctgggcgctcggcgtctttttgtacaagctatgctactatacgacacctttgtacgttgcctcagggtcaggagtccgcgacattcgcttgactgaccgctcgtctgaccgaccgcagcgaggagcacgggccgctcgccatcctcaacgtccagtatcgcgtgccgccttacccggtctactccaaccagctcaatctgctcgtcggtcagtcgcaaagcggtcgctttgccgtaccactcagaagctgaccgatttcatcgtccctcgcaggctcgatgctgcaggagcacggctcgcagcgcccgtcagcggtccagctgctcaagactgtccactcgatgcgcgggacgcgattgacgaaccactacgtgcgtctgcagcactttcgggtggcacatggtcaaaacctgacatcctgtcactcttcttcgctcggcaggacgagcccgtgtcgtcccagacgcgagacgggggcaacgacctgtttaacattatctcctcggtcggctcgccctcgccaaacccgagtccgttcgcggccaacattaccccgatgcgtcgaggtcgtccaaccaagctcccggccggcaccggagctgcgtcaccgcaggtgcccgcgcccgttgccaattcgaacccgcctctgactaaggggccggcgccagccgagctcagcccgcagtacacgattccgtcgactccgctcgatctgcccgctaccgctggccaacaggcgcagcggccggagatcacgtcgcgctacaccaatctagcgccgccccttgacgcgccaacaggagttccgaagccaccccagccgacgattgatgtcaccggcgagaagagcccgcaaccgacgagcgcgcagcccaagcagctggctgccggctcatggtcgagcttcggcagtgcgtctgggagcacgtcgcggccgtcgcccgcggcgactgctgcctttgacggctttgccgacctcgaggaacccaagtcgctcaaggcaagccggaccgcgtcttcccaaacgtcgggcttcagtgccttcctgccgccctctgcccagacgtcgctcagcgtcccgccatcgctcccaccgcgcaaaccgtcaagctcctccttctcggctgcctcggcctttgacggctttgccgactcgtttacagacgcgttcgtcccgctgtcgtcgtcgccgcaatcaatggctggcggcggctcgccctcgtcgccccggccggccagctcggcgtccgcgactgtcccgctcctggctcggtcgtcaggtagtcagtcgtctactggcaagctcgacgcaccagccacggcccctcttggtccagcgcgcgagccatcgttcgacgagcgctacccctcggtcgagcagctcgacctccgatccggctcgacgtcgccccttgcctctgcggcggcccctccagccaccacaacgacagcgggcgagagcgcgtcgtcaatgacgaggggcttcatgccgcatgccggccggagctacacgggctcagccggccagccgacgccctcgatcctcgacatgagccagcccgtcttccccctcccgcgctcgacgcacgtcaccggtatggccatgcggaacggcgaggagggcaagcctcagcagccgggaccgaaccgcgctgtaggaggcggcacaggcgacgtcgcctggggcgaggatccgcggccggcaggtccggacaaggccaccccggcgccggcggcagcgtcgactgagaagcgcgagcgagcgcctccgaagcaactcacagactggttgacgggcgacgcttcgcccgcgcaggagtcgtcggcggccgccatgctccctccgacgctacctccagccgatgacgggccgtcgccgtccaacccaggctcaacctcgtcggctccctcagtcgctttcaaacccgcgatgctagcgtctaacgctggacgtttgggctcgaccgccgctctcaaaggccctcgctcgccgccggcaaaagcagccaagccagctgcgctccagacggccaaaaagccgtcgtcatcgagcatcctgagtgagcagtggtcaccggtcgagacggcccgcgcaaagctgtcatccccaacgacagcgatggctcggtcgccatccggttctgcccctccgcacatcgagtcgagcgagaacgacgagcaagcgggtccggaagatgcgacgcgcattctgacgaccggcaccggcaccgacatcatcagcaagctgcccgaccaggctcactcgtcgaccccgaattcatggtcttcctcgaagcccgacccagcgccggcggtcgttgcctctaagcccgcaacaaacgcgccgtcgtcgcaacggcggacccacgtcgccccgtcgtcgtcgtcgtcgttgtcgttcagctcgtccaacgcaccccgccggcttccgacggtcgattcgggctcggccaggagctttctccgcggcagcggcggcagctcgtcgctcggccgatcagcaaccctctcagccgcgtcgagcgcgaggcccaggccgagaccgcactcgctatactctgcttcgtccctcaccggcggcggcgctcagccgaacggcgagccaaacctcgcatcgatcgcggctgacgatggcggccttaccagtagtgactcggcaacgcgctcgacagcgccggcagccaacctctcagtccccgccggccaaatggcagcctcctcgctcccgtcagcagcagcagcggcggtcccgctcatcgcccccaagcctcagcggcctcttacgcacacgaacgtcgcctggcgtttcgagcggggctcgcccgtcgccctcacttcccacccgacgacgacgacgacgacgaagggcgcgtccgacggcgccggcggcgctggcaggcaagtgccgaacggactgccttcggcggcgcaggcgaaggagagaagcgctcctgtagcggaagcggtcgaagagcgcaagagcgtaaagtcgctcatcagccgctggaaccagggagcgcactgaacgcgcgcgcgagcgcaagagaggctggcctgggcgggcgaggggggttaaaatggaagggagggacaggagggtcgatcttgatgacaagactgcttgttagccggagtgttggcgtgtgagaaatcaagggggaggaagcggaaggtgggaagaaggcatcgtacactgagacaaagggtcggccggaagcggcggaagaacaagggtgagaagaaaagaggaaggagggagagggcggatctgcgcgcgcgtgcgaagcgagccgactcggccccctctatcccccttccggacgaatcgatcctcgagaaggttgagaaaacgaggagcgtgctgctcgacactctacttgttctgaacggccttgacgatagggactgcgtgtcgttcaagcgagcgcgcgagcggcgggggagggtgtcagtctgcttgcgcgcatggaggaggttcgactggtaccgggcggcgtgggttgactgccggcggagggggggcgaaagagaggatgagcggtcccgtccggccagggagccgccttcatctcgtcccgtccagcactcaagccgacagctcatgacggaggtcgagacgctgtgtcgtcggcgacgtccgggcgacaccgggcgagtttgtcggcgtcggcgccggcgtgagtgtcatggttggcacctgctgctgttgctgtcgctgttgctgggggctcgagcgagtctgctgctgctgctgctgctggtaagaccgtccggcgatgtagaatggagcggcggcagcgtgcgtcgccgtcattgtcgtcgggcctgatgccgagcgggcggaggacgagggtgagaagtcggccatcgaggcggacgagtggatgagccggccgagggtgaggatgtcgaagacgcggacgttgaggtgccgggcgagggcgagggcgaacggcggcctgtgcgaggggcggggggcgaggcgggggcgcggcgagtatgacaaggaatggggggggttcagcgcccggagcgaagagaggcggtgacttcgacgagacgaggacgagacctcacatgtttgtgcactcgagcacgacggccatgagctcgccgcccttcttccggcaaaccgcgcgcagccggtcgcccgcctcgagcacctcggccagcatcccgtcagggtcgtacggccgctggccgaggaggacctgctggaaaaggccgtcctccgggaggccaacgaagggcgtgttggggttggcgccaacctggagcgggacaaagcgaggtcaagaggagtcgctcggtcagctcatgactggaaggtttgagaaggagagaagggagacgggaggtaaaagtcggtcgagcggggagtccatgcgaaaggccgagcaggggacgcataggtactcaggcaagaaccgaaagggggaacgcacgctgcagaagtgcttgatcgagagcgacttctcgcggaacgtcaggacgccgacggcccctgactcggggtaaagggctgcgagcgtcggtagctggacgagggcgctcgtcccgatcgacggcaggtggctcgccaactgcaagtgggccgacgccagcaggccgcaactcgtgacgagagcgacgcagccctcctcctcgatgagcctccgacccgcccggacaaaggcaaggatgagatcttcggaccagcagcagccgacgatggcctcctgcgtcgccgggccgacgacggcgaccttgatcggaaacggccacgaggccgggtgcgagacgtcgccgggtggtctggcgaaggtggtattcagctggaggatgccgagcggccgctgctgaggaggcggaggcgaggacgacatgctgctgttgttggttagctcgaagggaggaagatggtcgctggcgacagccgccgcgtgcttgcgtcctttcggcgagcggttcggcgaagaccgacggcttggcaaggagcccgatcgggggagacgatggggacagtcggggaaacgattgggaaggtgcccaagtgtccgacctctagcgcagccgccgccaggcctctctctctctctctccctcccgactaccagcatcctgcccttcaagctatggcccctgatgcgccctcggaggcctccctagcaccagcagcagcagcgacgacgagctccaagcctcagccggtggccgcagctcgtttgtctttacctctcttcctcgcgcgcgcgcccgagggctgacacgcgccttcacctcctcctgctcctacagactcgcgcccgctcgtcgacttcatcgcagggaccgccggtggtgttgccggaatcgccgtcggccatccgttcgacacggtcaaagtccgcttccagagcccctccttcgccggccgctacagctcgacggccgacgccttccggcagattgtccgggccgaggggctccggggcctctacaagggcgtcgtctcgcccctcgtcgggatcgcgcccgtcaacggcctcgtctttgcctcgttcaaggggacgatggccgtcctcgtcccggcgtcggcgagctcgagcggggaagaggcctcgctgacgagctactttgccgcaggctgcgtctcaggcgccgtcgcttcgctcatcaataccccgaccgagctcgtcaagattcgccagcaggccttcaccggcggctcgtcctcggcttcctcgcaaaagcagcagccaccggggacgtggtcgctcgcgcgctccatctggtcgaccggcggcttccgggccctcttccgcggcttcaccccttgcgtcctgcgcgacctcggctacggtccctatttcctcacgtacgagctcctgctccggaccatctcgcccagccggccgtcgtcgagcggccggccagacctgatcgtcgagaccgaggacgagctcgtcggcgacccaggccgcggctggtgggccgtcgccgtcgcaggcgccgtcgctggcgtcgtctcgtggacggcaactttcccgtgggacgtcgtcaagactcggatgcaggcggccgctttccaggctgaagcaaccgccgctgccgtctcattgacgacgacggcgacgctagctggcgcaggagcaggctcttcgcgtctcccgccgtccttccgacctatcccctcgtcctcctcggcaagtcgcacacccgccctcgccacctcgacctcccgatccttaacgcactccacgccctcgccttcacctcgcccagtcggccaagccgcgctcaaccccttccgcacgacgcgctcgaccgtcctccacgcctggcggaccggcggtctccggtcgttctacgttggcctcgcgccaacgctcctcagggcaattccgaccaacattgcgacattcagcatcgtacgttttgcctttccttgctgacgggtattttgaaaacagagaccagagccgctgacccgcctggatcgcccctgaccttactgacccccttcgcacagttcgaagcggtcgtcgccttcgcttaggaccgagatgcccttcgcttccccccaacgccgcctcgccctccccaaccgtccgcttttgtagaacttagatgccccggaaacccctggcctgccccgacctgcggggcgctggacggtcttccgcgcgcgcgcgcgcgccctcctcatccttgtagcctttaacgttgattcgaagatatgctgctttgcacttgcttcgtcggtcgtcgtccctctccgggctgacgtaggccagcaggaatgcttgctggacggacgtccagggacgagcagtccgcgctgtgctcttggtcgagtcaagatggcggcgtgcatgacatagcatgctgggtgagtaggggtgggcgttctatgagatcggaggcgtgcccttcgtctcgccagacggaaggacgtcctgcaacggacacaaagggaagtccaaagcgcgtcagttgcagccaaggagtctctcgcagctgagcttcgctcgctgaggagaagaggggctcacctcgggtgactcggatggctgagggacggtcggctcgccgtcgctcggtagcttgtccgcgaccggctcgacgatcgactcctccgcctcggttggcacctcgctctcctcctcctgctcgagcgagggcggggcgacaatcttgatgggatcacccatgacgggctgctcgaccgtcacttcgtacgacggctgtcgggggccaagcaaagagggggagaaacaagtcagtcgacgtgctacgagagcgcgagagaatcgaagggaccgaccagctcggaaagcaacctaaaaacctggtgacgcgtcgtatcgtccttgaaccggagccggaagatgccggcctgttctgagatccggaagatgtagtgcggctgtaggagcttcttgatctgtcggcgactttggcaatccgcgggcgccttgacgatctgcggttcgcggcaggtgcggttgagtgatcgtcagcggctcgactcgggtctgaggtcgagagaagaagagccgggcactcacccagagctcagactcaaagtcgttcagcctctcagccccgcgcgtcgggcgcccgtcggcatcgggtggggtcagcgaggtgacgacgccgggtgcctgcgagagaaagcgccaaagcgagcgagcgtgtcagagttcagcgaccaggccggcgtcaggggcagccgcaggtttgccgagagacgtaccggcagccggtcgagtgcgagccggagctccttagccgtcttgacatagaagagggccgtgtccttgatgtcgcagtcgacggcccgcgccgagcggacgccgttatcccggaggaactgcttgtaggcattgtgggcgatcctgtagttgacgccgcttttgaacgtggcctgaaagtcacgaagcacgggaggagctggagaatcagcctttatctcgccatgaggggccaatgcgaagtgcagacggggagacggacaaagaagcggcatgtaccgggcggagtgtccgggataaactctggcagcttgacctggagcatgtcctccgtcagctgggacggtcaagcagcgcacagaccagagcgtcagtcaggtccgtcccctagaaaatccattcgggtcaggagcccggaaacgcaccttgtcctcgcgcttcctcatgccccggacgctccccttctccttcggtccggccggatcatagtcgtgctcgttctcccttcgcgcgggacacttgtcgttgtacttgacgtcgcggtacccagccttcatccgcggccgctcctcgctctcgcggtcggaccgcgcagccaggcgccggtcggcatgcctcaggccgggggcatcgtcgccgtatcgccgttggcgcatgcgcttgaagcggctgtcaaggtcgtcggtgtcggactggaggcggtcgagatcgctcggccgagtgacggcccgcgactcgtagcccgactgggacgtggcgaaaggccgacgatcatcgtagtgctaccgacggtgaagggaggggagggaagggtaaaagctgggagtcagaggtcggtcgaattaaagcatccaagtccgaagcatgagagacgagcttacctcggtagaccgagtccgggggtcgagtggccggtagtcgtccgtgtccctcgtcgagcgggtctgaggatagccaagcactcgcgtcagaaacgacctgatcaaaaggcagcgatcaagatgcaggccacacctcataccgttcgcgaggcatcctgccgtcttcgtacggcgacgagcgccgctcatcacggtcatacgacgacggccgccggtcgtcacggtcatacgagcgactctcacgcggcgcacggtcaaacgaccgctcggcactctcgcgcggcggaggagcatcgtacgacggcggacggccatagtaatcattctgctgaagctgtgagcagggcaagaacgtcagagagagcagcgaggggccaccgacggggctgacggggagaaaaggacggaccatgtgagccggcgtcgagcgaggcggcaacggccgaccagcttcccgagcctccttctcggcgagctgtagcgttcaaggcagaagagagacaagggttagcatcggtctggtccctaccgagttcatgggtctccagaatgcagatgacgagaggagaggccgcctctcgcgaagctcggccagcgcccaggagacgcaggccgctccgcccgagcctcccgttgcctcctcatcatgcaagcgagcagagcagcgcagattacagagtggcgagaaaaacatacccttcgcctgccctggtatggcgggctgacgacgtgctggaagcgtccaggaccgaaggtctcgtcgtagccgccgccgccgcctccgccgccctgtacgaggccgaaggagctgactgtgcgagcgccagcgggaattgggcggctgacggcggcgagcgaagccgagctcgagaagagcgtcctgcgcgtgacggcggcgtgcatgattttggatctcgagacaggacgaaggaggagtccgaagtgcaggtcgaggtcgagcgaaggcgcagcgcagcagtcggctcgacaggcgaagttcggcgtctgctgctaacttcgagccctgtgtccgcgcaggcagactctcgagttccctcttcaacctgcccagatatctcacagaactgtcggcgttcgcttcataagatcacgctccgcttcacttttcttccggcgctagtgacgacggcgtggatggcgagtcggcagcggcggtcggctcggcctccgctggcggcggagaagaggtcgcagtcctctcggcctccgagaccggctcgtcggactgctgctgggctggcgtctccgaggacgatgaggcagatgccggtgccggctctgctgcctgctcgaccttggcagcctcggccgcctcgcgcgccttgacccgctcgtcctcgtcgagcgcgcgcttgagctcctgcacctcgctcacctttgcccggtagccctcgagctccgatgcccacttgccctcctgttccttgagcttcgcagcctgcgcctcgcgatgctcggtctcgcgcttctccttcgcctcggccttctcggtccgtttccgctcgagctcggcggcaagcgtccgttccgcctcggccgtcacgcgctcggcctcctctttgatcgcgctggagacgccgccagggggcaggacgtaggccgtcccgcggatggcagcgcctttcgtccgggccggcgagggctcggcgtactctggccagtggcctgaaggcatctgctcggtgacctcccgatgcttggggacgtacgagaaggggtgctcgcccctaatgagcaaaccgcactggaaggcgacgacaaagcaggagagggcactggattagacatcacgtcagggatcggcgggaggacgactgtcgcgacgcacctgctcgagcagcttgacgaccgcctttgtcggctgcgccccgcctttctccagccaccacttgatcttatccccactgagctcgatacgcttctcgagccgcgtcgcgttccgcccggcaaagctcatgtcttcgatgccctgctcggccgacggcaggagccggcgcatcttaggctcggggtcccactcgccgagcttctcaagcgggagcgcgtcgcggctcgtccgggaggtggtgatgacgaggtgctcgcgccggaagtcccgcggcttggtcttgagagcgatacgcatgcggctggcggaaagaagacgagggtacgaggaagggaggcgagggaggagagacgagggacgaggtcagtcttttttgccgttcattcgaagtcaaaggcgagcagcctttcgcccgagcaacgctgacagcaaggagacgcagctccacgcttgccagatcgaggcagaagagcacaacggcggcggggacgtacaggccggccgtcttgacgtgcttcgggacgtggacccgcttgggcaggcccaacctgaagggcggaaacctctttgtcgtctgggccatgagttcaacccgggcggccgccttggccgcctgctgatggaggaccgctggcgaggaggacatcttgcgagggaggacgggtgctggatcgaggtcggtcggcgagagcaagtgacaggtcggggctgaaagagcgcggcggccagcctgccgacctagggttacctccgccctgccccgtcgacattctgctctctccagcactcagcttgcacctttcaacaacccctgctttcccagccatggccccgccaaagacactcaaatcaaagcctaagcccaagcagcggcagaagaagccgtcggcccgcaactcgcgttcggctggcggcgccatgcaaacctgggacgacacgatcgaggagggtggcgccgacgagtgtcagtccctgtcttcctcacctctgccgcttcctgcacctcacttgaagctgacatcgttgcttgcgcgcgctgcccggacagtccacaagaaccgcgacaaaattctgctcgaagatacgactgggtcgaccaagctccggcgcgcgctcggccagacgtcggacgacgagtttggctcggaggaggaggtcttccggccgacttacacggcacccgacgacgaggaggctgaggaggcttacgagaatgagcacgaggtggaggccgagccggctgtgaggaaggagcggaagcgtgtccagaaggagcgcgcgaagaagggcctcgtcgagcctgcaaaggggcggttcgcgaagcccgatccgacctcgtctgacgacgacgacgagcaggatccggacgacgactctgcttcggctggcgagggcggctcttcgtccgaggaggaagaggagaactgggggtccaacccttcggcctattacgcgcgcccttcagcccggcgcgggcgggacgaggtcgactcggactcggacgacgaggagcttgccgagcggcggatgctcgaggagaaggaggtccggctccagcaacgcaaggctcgggagagcatgagcaaaggcgactggggtttggacgacctggccgccggtgctggagacgatgtcgaggaggaggctcctgaggaattgaggtgggtgttacctgccgccaccgtttgctgcgcccgctctcgtcctgcttgacgtctgactcgatcttccccttcccttccagcgccgcccccgccgctcccgagacgaccgacccggccgcactgctctcgcacctccagcggcactcgcccgagacgctcgccctcgctcgcgagtggccggcgctgattgaacgcctgccgctcctcgctggcgccatcgcgagcaagaccaaggaggacccagagtacaagggcctcgggatgatgtcgctccactatcgtctgtcccctcacttgcacctctggcaaagccagtcctttttgctgacctttcactttgcttgatctcgtagagacctacctaacctacacgacgacgctcgccttttacttccacctcgccgccctcccctccgcaacccggcccaacctccagtctcacccggtcctccagcggctactccagctcaaggaggcgctctcgcagatggaaaatctcgactttgccggcgacggcgacgatgacgaggagtcggacccggacgagtttgcgcacgggttcgagggcgagtcgttcctaaacgatgacgacgatgaggacgaggatcaggaggacgaggacgagttgctctcgctcggcggcgggccgatggacggcaagcgcgacgccgcggccgagcgcgagtggcggcagcagatgctcgaggggctcgaggagggcgagctcgaggagctcatggccgagatggagcgcatgaagcgcggcggcggcccctcggacggcttcgacgacgacgacgacgacgacgactttgacgacgaggacgaggacgacgatctgctcgatctgccggccgtcgtcaagccgtcgaaaaagtccaaggccggaatcaagccggtcaagaagaccaagacgtcgtccaaggcggccgggccggccttcccgacgatcgacgagccgacgccgtccttctcgtcgtccgccaagccgcgcaaggcgtccaagaaggcgtcgacgtcgaagctctcgaatggcgacgacgacgccctcgccgagccgacgacgctctctgcgcccgactcgtctgcaaaggacgcggccaagcactcgctccgcttccacacggccaagatcgagtctgccgcctcgcgccgggcgtcggcccggtctggccggatgggaggcgacgatgacgtgccgtaccgtaacaagcaggccgggcgggatgccgccctccggaagaactctggcgcgggcgccggcaacaacggcgatggcgacgaccttgacggcgaggagtggggcgaggccgatcgggcggcggcaaaggccgttcgtgagatggacggcgggctcgacatggacgaggaaggcgacgacggcgacgacggaggcgatgcgggcgagggcgacgacggctactaccagctcgtcaagaagcgcaagcgcgcggtgaagggggacaagcaggccgcgtacgacgaggctcgcgaggaggagcggtgcgtgccgcctccagcatccgattacgaagcttccgggactgacccttccccctcgtctttcaggtttgtcgaggacgacgccgcgactggcccccgctcgctcacacgtgccatcctcaagaacaagggactcacgccctcgcgctcaaaggcggtccgcaatccgcgcgtcaagaagcgcatgcgcttcgataaggctaagaagcaggtcgcgtccaagcaggccgtctactcgggcggccagagcgcgctcaagggctcgtacggcggcgaggcgacgggtatctcgcaggtcgtcaagagtcgcaagttctgagcggcgacgatcgcatgcgcatcgcacctcagctgtaccagtcgacaaagagcagagcgaggctcgcgccgacgagaaagacgaggatcatgagcgtgctgctgctcgcccgctcgttggccttgcggagctgatcgttgccggccttgacgtcggcgacgccctggccggcctcgagcagcagccggtcagagacctcggactgctgcatcagcgactgcgagaggagcgactggagggttgagatctgggcgagcgcctcttgcgtgctccggatctgacgggggatgatggcgtcagggttatctcatagtcgagcagcggcggagtgagcgcacctggtcgagatgcgagttgaagccctgcatgagctcggcattttcctcctcaaagagctgcatcatgtcttgactgagggcctcctcaccctcgcgctcgatgacgggcgcagcaggaacggcaaagcccgccggccggccgctggccgtctgacccgccgagccggccgagagcagcgccgctctgttgccgagggaccggtcggcctcctcgagccggcgcatgcgctcctcctggaggtccgagagggctgcgccggcgcgcgagagcgtcgattgcaggtggtagaggaccgaggcgtgatgggcggcgatcagggtcgctgcgaccgacgacggcgaggacggcggcagcggctggagcgatggcggcacgagcagctgaaagagtcggttggccgtgctttccggttctgccagaacggaagcgattagcgacaagcgacagacctcctcaacgacccagaagaggatgcgcgcaccgatcccggccttcttcttgccccggcccgagcgctcctcctcgcgctcgagaacgaggatccgctcgaggcagcccttgagcaggagctttgcccgaaggtcaaactcttcgcggttcttgtcatcaaagcgaggctgctcgcgcgccttgcctttgtcgcccgacatcgccggcagcgagagatactggcgccggatcgcagcgagttgcgtgcggaacgtcccgaggtggttgtgctatcggaagaggaggaccacggtcaggggccaagccaatcgttcaaaggcaaggagacctgacacgcacgatctgataggcctccttcagaaaagcatcctctgctcgtttcggtcgtgaaggctcagcagccgtcgtcgtcgtccggccgtcgatccagccgccgaccggtctgacgtcggcactcgctttgcgctggtgtagctggcggccgctcccagaggctggacccggtggcggatactgggcagcccgcgtctggagaaggcccttgaaggtcgccgtcgtctcgacggccatcgctgcaggtggtaagagctggtgaaccagtcgggcgagatggctgtctggcgggtgcggccgagcggcctcgagcggcggcttgccgtcatttagcccacgaacgtcggccgtctactcctttccgactacctcacctagctcgctctgctacgtccgaggacaggctgctctcgacgtcccagctcgcgtgcaacagacgccgccctctcaaggccctttgagcaagaacgacggcgacacaccagctttgcccggctgcgcagcccacctcgacgaccaccccgtcgacgccgacctcaaacctcctgtggacgagctcctctcgtgcgcctctcgcttaaagatgccatcgacgccttcgcagacgggcttgctcccagacgcgggcgtcaagcgccgacggagcctgcgttcctggctggccgacccgctccctccgagggcgttgacggcgccgctgctcctcctgacgtttgtcaacgcacttctcgacgctgcgtcgtatggctcgctaaaggtgttcagctcgtgccagacgggcaatatggtcaccttcacaatcaaggtgaccggcaacggcccgacgggcgatgcggcccagggccggctgagcgccgtcggcgcctcgctcctcgccttcatcgccgccggcttcgtctttggccatgccggccatgcggcgggcgaccgctcgcggggctggctagtctgctcgctcgtctggcaggtggcgttcgtcacgctcgcttcggtcctcgtctcgatcgaggtgatccggacggccgacccgctcaattgggttctcgtcatgctcttcagcctcgctggcggagcacaggtcgccatggccaaaggctgcggcaacccgctggtctcgacggtcagtcctacgctgctctctcctctcgtctgtctttctgcgaggctgatgcgtcgacgtctgcacaacccgctgcgcaggccatcctcacctcgcccctcatcgactcgttcggcaaccgggacctcctccgcccgcgaggcctcccgaccagccggcgtcgaaacctcctccttcagtggatctatctcttcaccttcctcggcggcgcactcctcggcggcggcctctttcggcgctggggagccctgacggtcttctggctgtcggtcgtcctcaggctcggcgtgctgctctgggtcgtcctcgttcggcgagaggaggccgaggatccaaagctaacggcggcggcgacggtagacttgcctgctggtgcgcgggcgacttagtcgcgaaacggctggctgcccaaaggctggcttaactgtatcgcttagacggctgcgctcgatgatttagatgctctctcgcggaacggtttcgcagcgagcagggataagggcccattaatcacgagaggggagacaaaacaagggcgaggtcgtaaagtgggacgtgaagcgcgacgtgtgcagtgcgagggaattgtggaggtgtcgcctgtgccgactcaggccagaggggagcgactttggttggcggactgaccggcgccgaagtcctggaggtgcaatccgtgaagggcggtgatgatggtagacgcgtctgccgaggccggcagagggggcgagggtgcgtcccaggcctgcccgatgttcctttgcgtcagtgcatgaaacggaccttgcgttctttcggaggacgtacgcgtggaatgagagcgaccggcagcgcccacgttgccgacaggacgactccccggccccggtcaaagctcttgacgtggctccagctatagctgacgaaggaggcgatgtagccgacgattggtgcgaggccctgcaggaggccaacggcgacgagaaggggcggcgaaaggaggaagagcgagggcagccggtcgaggatgaacttgagcgcggcactaaaggccgctacacgtcgctgggtgaaagcaggacggggcaaaggaagagggtgaggtgagccataaagcaattcgggtgtccggccggacgcacgagggtgtcgacgccatcggcgttgagctccttcatgactggcggcggcaggtagatgctgggggcgtacgggtgacgaggtcagtgaggagtaaaaggggctttggcgagaatggcagagggcagggcacctgtagccccaccaagtggcctaggttcggcaaaagtcagcggcggtggatctcgagcgatagggaggctgagaaggcggctcacatgcaggctcatctgcgtctgtgagaaggaggagcgagatcagcgccgagccttcacaggctgggctggctgcacaacagggactaaccgacgaaggataccaaacgctgagtggctcgtcgaccgtgacgtcctgctggccgctgcgcatccggttcttcttcccaaacggccagcgaaacacgccggatgggcggtgctcgtgcttggccgctgacgggctgcccttgtggacgtgtagtccgcggtgggggtggttctggcgctcggcgagggccactattgatgggaggccgtcgattgggatgtcgcagcagatcatctggccgaacggcggcgaagggtgtcagtcgctggcagggtgcagagggagagtggtcgagttagagggagacggacgatcgactggcctgcctgtggcccactatgggacacgtcgtcgagctccttccagactgagtgcgggtgcgagcaccccgcgccggccaacgtgtcgtcctccgggccgttcatgaacagggccgaggcgaggcagtcgaacaggcggcttgggttgccgagcgcgcttgactcggcgggctcggtgcgctggaggatcgagcggagctcagcggcgacggctgaaggggcgggtgctgctgtgtgatggtcggcccctgttgagtcgccatcgctctcaacgagggtcgacttcgtcgtctggggcgacatggagaccgaggcaggtgtaggaggagcggctgcgacggctgggcagggcaagggaactgctgttggcttaagcggagaggccggcttaaagggaggcggtggcatgggtgagggtggcgagatggcgccagcggcgatgtggtagagggcgagagcgagcgcgtcgagctcggccttgtcgcttcgaggctgccgagctggcttctttggcggcgcgggcaggctgggcgtcggacggcctagcgcagggattgcgggccgagtactgactgttgccagagtgtcgcgaatggaagctcgagctcgagctctcgggagcgggaccacccggcgaggcgagcaggtggaacgattgggcgcgccgggagcgtggaggttgagcgagagagagtcggaaggcgtagtaagaggaagaggtgtcgctcgagaggtcatgaggaggaggagagtttgggacaggagcaaaggggtgagtgggaggtggccggtcgagaggacagggtgtcgagtgttgacgcgacagggcggcagggcggcagggcgacaggggggagggaagtcggcggccgcgcttgcccctttctttccatcgctcggacccgcccgccacttcagcgctcgctcgaaaagcagccctgctcattggaggggcttaaagaggcacgaggcgaaggacgaacgttcgacgtttgtcaagaatgctcttgcacttttaagtcgacagccagctctcccagtttgaggctgtcgagtccctgcgcgaggcgaagagaaaaggcgctcatctgatctccgaaacgatgccggcgccaattgtgtcgccgcctcgccggagaaggatccgacccatgtccttgttgacggcaaacggctcgagcgagacattcggctggcgccggtcggtcgagtgctcgctcgaaggccggagcgtaatttcgacgcgcgcggagacgtttcgcggcagaacgctagggacggggaggggaaggggggggcttggaagtcagcgactgctcgcggtgacgtgtatcgacagcaggggcgcaccgcgggttgtttttgatgacggagccgtcggcccggtcaacgatggcaatcagctttgagaagacggctgggaggttggacgagtggtggaagagctcaaagaggctgcccgaggtgatggggatgtcgatgtcaaagaggatgacctgggcggtgaaggcggttacctgcggcacaagcgccgactgcgggcagaggatcgagccgatgctgaaaaggagcccggcaagcgtcagtctcagcgtcgcgcctgccggtcagcagcgggaccgggagagaaacgcacgagaggtggatcgggtcaatcgacgagaggtagacggtgacgttgctgccggcgaccgcccagggaacgttctcttcgtcgacctcgatgcctgcaaaaaagacagagccgacggtcagcgtcactcgaccagaactcaaaggagagacaacgcactacggacgaagccgctctcgtcgccgggcaggacacgcaggcgctcgccgacgcggacgacgccgctgcagatgcgaccggcgacaccgacaccgctcgacgtctggcccttgaacacgttcgagagcgggatccgcagtgggctttcaagcgctcgggtcgggacgtcaaggccgtctgcgagaggagtagagcaaggtcagcgtacgcattctccagacgacaaccgaggacgcccgactaacccaggagctcgacgagcgtgccgtccgtgtaccaaggaatgacctccttgccgggtgccttgtcgacgagattgacgccctgcatcgccccgaccgggacaaacagcgtcttggccggaaggaagcccgactggagcaagaacggccgcatctcatcctggatgtcgtcgaaccggccctgagaccagtcgaccgtgtcgagcttgttgatgacgacgacaatctgctggacgccgaggctccggacgaggagcgcgtgctcgcgcgtctggccgccaggcccaaagccagactcaaactcgcccatgccggcatcgacgacaagaagggcggcatcggcctgagccgcgcccgaaatcatgttggggatgaagtcgcggtggccgggcgcgtcgagcagcgtaaagtgccggtgcggcgtaacaaagtggtcctgcgcaatgtccatcgtgacgccgctgaaccgtgcgggaggggggcagaagaggccaagatcagcaaagatgcgcacggcttgggctgttctcgcagagacgtaccgctcgcgctcctcggccgtgccgtcaagcgcccaggcatactggaacgagctcttgcccatctttgcgctcccgcgctcgttccacgttttttccttctctgacatgacgccgagctcgtacagtaggcggcccatcagcgtcgacttgccagcgtcgacatggccgatgacgacgaggttgatgccgcccttgccctgcgcgagctcgcgctggacctggtcgatgatctcgcgccgctcgatcgtgagcttgggctccggcagaggcggactcggcggtcggctgctctcgccgaggttcatcgcgtccatgtcgtctcgcaggccgttccggctggatacggccggggccgctttcgacgtcgttgcggccgtctttggtttgggcgcctttgccgacgccgcagcttttgatgcgatggccgctgatgtggctgccggcgccttcgtcgtctttgaggccgctgtcgggcgcttgcacgttcgtcagtacgctcctcctcgagcctaactgttggcctgcgctggccagcctgtccacctcctccaacaaccccttcacttcctgcccttgcctcccgcgccaccagtcgcaacgaccggcccttcagccagacgggagccgacggccgtgccctttcgcttctcggcgacgatatcgtccggactgagcgtctcgaacgcgcgccgtaggtcctcgagcgtgtcgccgacgtccgcgaagccggccagcgtctcggcgtgcgcgaggtcggtcgaggcaaagacgagctcggccggggcctctgagcgctttggcgagacgaggagagtcgcaaaggcggacggccgatgggtattgagcggcggcggcccggtggaggaagccgagaagagcgcgtcggacgcagccgcggtggccgccagcatcgggtcttcctcgagctcggcgccttgcacgggacttctagggtcggctcctgcagtcttgacgccgcctggcgagggcgaggcaccccccgcattggccttgacctggcgagcggcgagcatcttagcctgaagcttcgagaggggcttgtccgccggcggtgttgctcctttggaagcaggccgagctggcgcagcggaagacgaggcggctgccgttcggcccttggcaagcatcgcgagcttcgagagcttgggcgctcccatcgaggcctccgactcggccggcgaagaggaggcccgcggctcgggcgagttgcgggcggcgagcgcggcgagacgacctgaggccggcgacgagggcagggctttgcgagaaagcgacagccgttggagcgccgtgagagggggcgttgctgaagacggcgtgggcgacgggcgaggaagcggcggcgggcggatcctgtctgcgtggacgaggcgaacgaagggcgagggtcagctaccgcctgattgatcaacgactgctcctcgcgcggccgccgagggagagcaaggggagggtgggccttacacgctgaggggaagccgacggtctgattcaacgcgcgcccagacggcggcaccgttcccctcatcccttctctccctcgacttcgcagcaggccagcgctagagacccagagcgaggaaagagcgactgaccttgcttcttgccctttttggcgttcttgtcctgctcagctaagagccactcgaccgtctgttcggcgtcaaaaaagtagtaccagagcgagtccttaacctctttgtccgagatgcccgagtcgtccgcgctcccgaggagaccgcggacatgctggaggccagacgtcatctggactgcgaggccggcagaagagctttggtcaggcgctgcactgccaattcgacgctctgctggtcgacgcactctgttggtcggcatccatgtcgtctgtcggggttcgcgcgtaggtgctcagcgcgtcgtaagggaaggcagcccagccgaggtggcgggctgaagccgcagaaagcatagactcaccccactcgttgccagagtcggacgcagagtcctccctcatctcctctacaaatggtcaagacgatgttagcctgctcagcatcggcaccggttggcaaggtcgagctgtcgacacaccatcgaggtcgaggttgcggatgtcgcgatggcgggacctgcaggaggagcggcccacgagtcagcgctcatacaagcagcagggccgaccggtggcacagacgcacatgtcttatgcgggcagacttccagacttgagcagggaaggaaggagagagggcgagggtcgaggagatcgaggtcggagggacgagccagcgagagcccatgacgagtgcgcgcgtgcaggcggccaagtctagctgaatcctcttacagcgacggctttcacctggctcacaagtactcgtccgttcactggcccttgcaggaagcaggaacgacatggatcggccggccgcttcagaagagaggtgtcgcccccctgcggcttggataggcgttgctgatgtgccagcggtcaaactcttgctggtcgctgagctcgatctcgacgtcatcctgcgagggcaagagggaagaaagtgttagcagcccgaaactgtccgagcttcgttcagggacgcgcaaagggtcgatgaagcgagcacgccttgagcaggcggttcaacgcccggtgtctcgtatgccagtcccggccggtcgccgcctcctccggcgcaagctcgaggtagaccgtccgtaggcctggccgggcatggacagtcgcccctagcggcgtcttgccatcaggttcatcgcccggttggggcgcgtgccggtgtatcatcgaagcgaggccgcgctcgaaagcctcgggcgactcgatcggtgggaggtcagagatctgacgacgacaacagcgtcagtcgggagcggcgcgcgcaggcagcagggcagagacaggaaggacgcactctgacccaatgccggagaggcgcaaccggaacgttagtttccaccgccttgacctccggttctcgcctctctttccagctgggcctcgaggccaaacggaagtggctggcgacgaagcctccgggtacaacgggcgcctcgacagcgccctccgtcttggccccgagcgcgagtaaagggctagcaggctttcgagcaggaggcggcaccaggccagtgttcttccctgcggcatgcatgtcccagagagcggaccaatcatgccgggcgggcgcttcgggaggcgacgagggcggctcgaacggagggagcggcttcacaggccgcgatggtttgaccgcatgggcctgtttagcgaccttgagagaggaggaaaggacgcgttccttggccttggcacgagcagagccggcttctaccgaggtgtcgtcgggcactttggcgttgctgaaggacttctgcttgacgccggctccattaggcgcagcgggagccgagctttgcggccctgccgttccgctggcaagcgaggcccagctgggcagcggaagagatgaactcttgtaaactgcctttacgtcgagcgatgcaagaccaattgctcgctccgagacggcaggcggggacaagggaataagttttggggctcgtttcggttcggtaactggtgaggagacgaccggcgaggactctggcaggaggccaaacgggaccagggcaggactgggttgggtggcggccagcttggcctttggcgggagtgaaagccgcaagccgcgtgtcggcttgaccgagcgaggcaaagcggctggtttgacaggaggagggggagcgaccacctcggcggcgacagtcggcccaggatccgacttgggcgattgcgagacggccagctcgacatgaagcagagcgtccttgagcgggatagtttgacggacgccagccgggggcttgggacgattcgagagcgcgaccgccctcgctttagttttgaccgagagctcggatgaccggaccgaagcacgacgttcagtgggagagcgtttggcggacgacactaagggcgcaggatgtttaggtgcagggaggttggtggacgactttgaaggtgcaggactggctctgacggcgcctgtgctcggtgaggtcgacttggggccaacgaggcgcacattttttacagcctcagacttcaggccgcccttggcttttttgtcccccgagtccgagactggttgccgagtgtggctctcccgaggcacgagcttgagtccttgctggtagaatcgggcccgagggcgagactgtcagctgcagtcgggagctagcgtcccgccagccactcaggactcacgagtcgctcctccgttcgtccaaggtcgagaaaggtctcgagctggcgacggagcgtgaagtgcaggtcggctgagtcggcgtcttcatctggcctgtaacggactcggacggtaccgagctgcgcctcccctggcccttggtgggagaggagggtgctgtaaacgtgctcgattggccggccctgctggacgagacccgagagctgaggaccggggggaaggctgacgatcagctgcgacatgccagatgcaatgagcggccgggaagcgaccgaccttgatccaattgccgtccgcggtctgtggcgcccggacttctgacctctctttcagtcggaccccagcgctcatagtggcaactgagctcgagttcttgaccgcgaccgcagcgctgctcgcctgtcgtgcctgggcgaccgagtgcagccagcgtcgggacagggcgagggtcgtcgaggcggccagaggtcggagttcgtgccggccgacgagcgagctcgaggctgagccgacggcaaccgacgttccgcgggcggtcatccctctaccttcgagggagagatctccagacaccggcgacgaacggctcgctgcgtttacgtctagccgagagagtcgttggaaagttaaagggtcagggatggagggcagccgacgactcgctcttgggttcgaggagaaggacgcgctcggctccctccgacatcgatcctccttcggtcgcccttctctctcctcgctccatcatcaagacggccacggggtctgctgcagcaggccatgtcgacgccagctcgtccgcccgctcgtccgccagttcgcccgcctggaccgacgcctggcgctcgcagtcagccggcggcgacgacgacaacccaagcgcgacctcctccgccccttgctggccagcagcaatcacgtccgccgatgcagcagcagcagcggccgccaggcatgcagcagcagcgcccgccgatgcctcagcagggtatccgccccaacatgccgcagggcgctcagcagatccgaccgggcttcgcgcaagggcaggtcgggccctccgcgggccgaccgccgctgtcgatgggcaacattcaggcccggcctccaattgcatatggccagccggggcaaggtagtgcgatgcagcaacaacaggcggtgcgaccgccgccaaagacaaagaaggagcgtgaccgggagcgcgaccgagagaaggagcgggaacgggcgcgagagcgcgagcgtgagcgggcactcgagaaggaggtcgcgccggggccgttcgccagctctcgtacgtcctggcactcgcttggttgatgagcaacgtgactgacttacctggccttggctgcgtgtcgcctgacagtcggtcgcatgatgtacggcttcggcgacgacgagacaccggccaacgacacagtgcacgtcatggaggatctcctcggccacttcatcaccgacctcgtgcgccccctcccactgtcgagacgatagacccgcactgacctgtgcctctcatcgctagtgcacactacctccgctgccagcgacgcatgcgtcgacgaaggcccggcaagtgaccttctcgcacctccaccaccagctttcgtcacatccggcttcgcgcccgctcctccatcggctcgaggagctcgccatcctccagaaggacatcaaggaggcgcgcaagacaatggatccgaccttctcgaccggcatgggcggcgggccgggcgatgacgacggggctggaggtctgctcggcagccttggtccaccggcagggtctaagaagcgaagcgcggctccggccctaggtgggaagaagaagaagcgatcgaacgaggccgaatgagcggcggccggctggaagacacgactaatgacccttgacgacttgaattgatcgaggtgggctcgaccggtgtgggaccgtcgcccggccgattaactcacatcgctcagcgctcgaggagacgcagtgcaaggctctgcttgacggctaagcgagagccaattagcgaaacgaaggtaggttgagcagaggcacattgagatcgctacccgggagcgaatgtttaggcaagatcggacggggtggctacaagagattgacacacaggagggaggggaagcacggacctgaaagtgagtcagataaggggttaggaaggagggacttcatgctacatgaggggttgtgagacacaagagggggggggtcccaatagaggcgaagggaggaggggcggggaggactcttgttttgagttcagcccgcgcagccccggcgcggatccctccctgcagcggcggcgtgacacgagcccggcgacctgagtcgttcaggagagcaaaaacgaagcttgagtgcggcgagaatcgaactcgcgtcctcagaatggaaatctgagataataaccattatacgacacacccatcgcataggacaagtctccacacgtatctcatattaggccatgccctcattcgccctcgccgacacctcaagccctcctgccactgccgtctcctgttcaagactagcgctcatacgattactccgtcagcccccgccgtcgctctcgtcgtccggttcgagactcctcctgcgctccctccaagcccgaccggcagcggtcccttcgcctagccgattggggtcaaccgtcgtgagcccagggcaggctcggcctcgcgcgtcgagtacgcggacgcccctccggccgagccggacggcgtattgccggatgaggccgttgagccctgcgttggcggccgcggacgagacgctcgtcgctgccatcgcggctggcgagaggacattgctactgccggcaccgccgccgggctggggcgttgcgggcacccagaggaagccgggtgagatggcgaccgtctctagcgaggggagcgcgatgactggccgaccacccggggtggcgaggctgtcgccctcgaggagaaagtcgaggagatcggcgtaagtcgacgaggacgtcctcggtggacggggcagcgtcagatgccggagcgcgagcgaggccgggtgtcggctggcgaagaacgttccggccggcggagcaacgttgttcggcagcgagtggagcgtcaggctgctgagggccgagcaaaagtcgagcgtcgtctcgggcagggcaaagtgcagcgccgggaagtcggggaggggtaggaaagcgagtgagttcagcttggggccgtgctcctcgaggagggccgtcgtcagctcgcccggatgcgtgtggtacgagctgatctcgagacgacgaagtgctggtagaggcgacgcgatcagcgtctggagaaggagaccagccgggatgccacgaagtgagagcgacgccagagacggcaggttgaccgcgacggcctgctcgtccaggttgtggcctgccgctggggcgccagcaccgccgtcggcaaaatcgagcgtcccaccgccgacgacgcccagccgctcgaggttcggcatcgcaatcaagagctcgacgaccgggtcgagcccttcgtgcgtgacgaggccgttggcaaagaccgggacgttctcaagttcgcgaagcgaggccggctggaagtcggcccggtcgagcagccggaggagtgttgtcgcgccgagcatgtacgactctggagccggcaaaacgacccgccggacgttgggaataaggggcaagatcagggaaagggtcgaggtgaagcgccaggggttgaaggcggcgtccgacgtcgaggccgtggccgaggcgatgtgcgagaggtcgagcgtctggacaaaggcgcccgggagcgaatgcggcgatgcccggaggtcatcccactgcttgtcggcccggacgagcgattgggcgagcgagtgaaagtagtcgagcgacgggagatgtgggtcgcggtagaggaaccgtcgagcctcgcgctgcgcggccaatccccaggacgagcgtcagcgtccgttcagaccagcagcactcgcaccagcaggcagggccacaccttccatgcccgacagacctggatggttgtcaggcgacgatcacgaagctcgcgccggtcgc
